(19) United States
(12) Patent Application Publication
(10) Pub. No.: US 2008/0113930 A1
(43) Pub. Date: May 15, 2008

(54) COMPOSITIONS AND METHODS FOR INHIBITING EXPRESSION OF THE PCSK9 GENE

(76) Inventors: Pamela Tan, Kulmbach (DE); Birgit Bramlage, Kulmbach (DE); Maria Frank-Kamenetsky, Brookline, MA (US); Kevin Fitzgerald, Brookline, MA (US); Akin Akinc, Needham, MA (US); Victor E. Kotelianski, Boston, MA (US)

Correspondence Address: FISH & RICHARDSON PC, P.O. BOX 1022, MINNEAPOLIS, MN, 55440-1022, US

(21) Appl. No.: 11/746,864

(22) Filed: May 10, 2007

Related U.S. Application Data
(60) Provisional application No. 60/799,458, filed on May 11, 2006.
(60) Provisional application No. 60/817,203, filed on Jun. 27, 2006.
(60) Provisional application No. 60/840,089, filed on Aug. 25, 2006.
(60) Provisional application No. 60/829,914, filed on Oct. 18, 2006.
(60) Provisional application No. 60/901,134, filed on Feb. 13, 2007.

(51) Int. Cl. C07H 21/02; A61K 31/7115; C12N 15/00; C12N 5/10

(52) U.S. Cl. 514/44; 435/320.1; 435/325; 435/375; 536/24.5

(57) ABSTRACT

The invention relates to a double-stranded ribonucleic acid (dsRNA) for inhibiting the expression of the PCSK9 gene (PCSK9 gene), comprising an antisense strand having a nucleotide sequence which is less that 30 nucleotides in length, generally 19-25 nucleotides in length, and which is substantially complementary to at least a part of the PCSK9 gene. The invention also relates to a pharmaceutical composition comprising the dsRNA together with a pharmaceutically acceptable carrier; methods for treating diseases caused by PCSK9 gene expression and the expression of the PCSK9 gene using the pharmaceutical composition; and

### CROSS-REFERENCE TO RELATED APPLICATIONS

[0001] This application claims priority to U.S. Provisional Application No. 60/799,458, filed May 11, 2006; U.S. Provisional Application No. 60/817,203, filed Jun. 21, 2006; U.S. Provisional Application No. 60/840,089, filed Aug. 25, 2006; U.S. Provisional Application No. 60/829,914, filed Oct. 18, 2006; and U.S. Provisional Application No. 60/901,134, filed Feb. 13, 2007. The contents of all of these provisional applications are hereby incorporated by reference in their entirety.

### FIELD OF THE INVENTION

[0002] This invention relates to double-stranded ribonucleic acid (dsRNA), and its use in mediating RNA interference to inhibit the expression of the PCSK9 gene and the use of the dsRNA to treat pathological processes which can be mediated by down regulating PCSK9, such as hyperlipidemia.

### BACKGROUND OF THE INVENTION

[0003] Proprotein convertase subtilisin kexin 9 (PCSK9) is a member of the subtilisin serine protease family. The other eight mammalian subtilisin proteases, PCSK1-PCSK8 (also called PC1/3, PC2, furin, PC4, PC5/6, PACE4, PC7, and S1P/SKI-1) are proprotein converges that process a wide variety of proteins in the secretory pathway and play roles in diverse biological processes (Bergeron, F. (2000) J. Mol. Endocrinol. 24, 1-22, Gensberg, K., (1998) Semin. Cell Dev. Biol. 9, 11-17, Seidah, N. G. (1999) Brain Res. 848, 45-62, Taylor, N. A., (2003) FASEB J. 17, 1215-1227, and Zhou, A., (1999) J. Biol. Chem. 274, 20745-20748). PCSK9 has been proposed to play a role in cholesterol metabolism. PCSK9 mRNA expression is down-regulated by dietary cholesterol feeding in mice (Maxwell, K, N., (2003) J. Lipid Res. 44, 2109-2119), up-regulated by statins in HepG2 cells (Dubuc, G., (2004) Arterioscler. Thromb. Vase. Biol. 24, 1454-1459), and up-regulated in sterol regulatory element binding protein (SREBF) transgenic mice (Horton, J, D., (2003) Proc. Natl. Acad. Sci. USA 100, 12027-12032), similar to the cholesterol biosynthetic enzymes and the low-density lipoprotein receptor (LDLR). Furthermore, PCSK9 missense mutations have been found to be associated with a form of autosomal dominant hypercholesterolemia (Hchola3) (Abifadel, M., et at (2003) Nat. Genet, 34, 154-156, Timms, K. M., (2004) Hum. Genet 114, 349-353, Leren, T. P. (2004) Clin. Genet. 65, 419-422), PCSK9 may also play a role in determining LDL cholesterol levels in the general population, because single-nucleotide polymorphisms (SNPs) have been associated with cholesterol levels in a Japanese population (Shioji, K., (2004) J. Hum. Genet. 49, 109-114).

[0004] Autosomal dominant hypercholesterolemias (ADHs) are monogenic diseases in which patients exhibit elevated total and LDL cholesterol levels, tendon xanthomas, and premature atherosclerosis (Rader, D. J., (2003) J. Clin. Invest. 111, 1795-1803). The pathogenesis of ADHs and a recessive form, autosomal recessive hypercholesterolemia (ARH) (Cohen, J. C., (2003) Curr. Opin. Lipidol. 14, 121-127), is due to defects in LDL uptake by the liver, ARH may be caused by LDLR mutations, which prevent LDL uptake, or by mutations in the protein on LDL, apolipoprotein B, which binds to the LDLR. ARH is caused by mutations in the ARM protein that are necessary for endocytosis of the LDLR-LDL complex via its interaction with clathrin. Therefore, if PCSK9 mutations are causative in Hchola3 families, it seems likely that PCSK9 plays a role in receptor-mediated LDL uptake.

[0005] Overexpression studies point to a role for PCSK9 in controlling LDLR levels and, hence, LDL uptake by the liver (Maxwell K. N. (2004) Proc. Natl. Acad. Sci. USA 101, 7100-7105, Benjannet, S., et al. (2004) J. Biol. Chem. 279, 48865-18875, Park, S. W., (2004) J. Biol. Chem. 279, 50630-50638). Adenoviral-mediated overexpression of mouse or human PCSK9 for 3 or 4 days in mice results in elevated total and LDL cholesterol levels; this effect is not seen in LDLR knockout animals (Maxwell K. N. (2004) Proc. Natl. Acad. Sci. USA 101, 7100-7105, Benjannet, S., et al. (2904) J. Biol. Chem. 279, 48865-48875, Park, S. W., (2004) J. Biol. Chem. 279, 50630-50638). In addition, PCSK9 overexpression results in a severe reduction in hepatic LDLR protein, without affecting IDLE mRNA levels, SREBP protein levels, or SREBP protein nuclear to cytoplasmic ratio. These results indicate that PCSK9, either directly or indirectly, reduces LDLR protein levels by a post transcriptional mechanism

[0006] Loss of function mutations in PCSK9 have been designed in mouse models (Rashid et al., (2005) PNAS, 102, 5374-5379, and identified in human individuals Cohen et al., (2005), Nature Genetics., 37.161-165. In both cases loss of PCSK9 function lead to lowering of total and LDLc cholesterol. In a retrospective outcome study over 15 years, loss of one copy of PCSK9 was shown to shift LDLc lower and to lead to an increased risk-benefit protection from developing cardiovascular heart disease (Cohen et al. 2006 N. Engl. J. Med., 354, 1264-1272.). Clearly the evidence to date indicates that lowering of PCSK9 levels will lower LDLc.

[0007] Recently, double-stranded RNA molecules (dsRNA) have been shown to block gene expression in a highly conserved regulatory mechanism known as RNA interference (RNAi), WO 99/32619 (Fire et al.) discloses the use of a dsRNA of at least 25 nucleotides in length to inhibit the expression of genes in C. elegans. dsRNA has also been shown to degrade target RNA in other organisms, including plants (see, e.g., WO 99/53050, Waterhouse et al.; and WO 99/61631. Heifetz et al.), Drosophila (see, e.g., Yang, D., et al., Curr. Biol. (2000) 10:1191-1200), and mammals (see WO 00/44895, Limmer; and DE 101 00 586.5, Kreutzer et al). This natural mechanism has now become the focus for the development of a new class of pharmaceutical agents for treating disorders that are caused by the aberrant or unwanted regulation of a gene.

[0008] Despite significant advances in the field of RNAi and advances in the treatment of pathological processes which can be mediated by down regulating PCSK9 gene expression, there remains a need for agents that can inhibit PCSK9 gene expression and that can treat diseases associated with PCSK9 gene expression such as hyperlipidemia.

### SUMMARY OF THE INVENTION

[0009] The invention provides a solution to the problem of treating diseases that can be modulated by down regulating the proprotein convertase subtilisin kexin 9 (PCSK9) by using double-stranded ribonucleic acid (dsRNA) to silence PCSK9 expression.

[0010] The invention provides double-stranded ribonucleic acid (dsRNA), as well as compositions and methods for inhibiting the expression of the PCSK9 gene in a cell or mammal using such dsRNA. The invention also provides compositions and methods for treating pathological conditions that, can modulated by down regulating the expression of the PCSK9 gene, such as hyperlipidemia. The dsRNA of the invention comprises an RNA strand (the antisense strand) having a region which is less than 30 nucleotides in length, generally 19-24 nucleotides in length, and is substantially complementary to at least part of an mRNA transcript of the PCSK9 gene.

[0011] In one embodiment, the invention provides double-stranded ribonucleic acid (dsRNA) molecules for inhibiting the expression of the PCSK9 gene. The dsRNA comprises at least two sequences that are complementary to each other. The dsRNA comprises a sense strand comprising a first sequence and an antisense strand comprising a second sequence. The antisense strand comprises a nucleotide sequence which is substantially complementary to at least part of an mRNA encoding PCSK9, and the region of complementarity is less than 30 nucleotides in length, generally 19-24 nucleotides in length. The dsRNA, upon contacting with a cell expressing the PCSK9, inhibits the expression of the PCSK9 gene by at least 40%.

[0012] For example, the dsRNA molecules of the invention can be comprised of a first sequence of the dsRNA that, is selected from the group consisting of the sense sequences of Table 1 and Table 2 the second sequence is selected from the group consisting of the antisense sequences of Tables 1 and Table 2. The dsRNA molecules of the invention can be comprised of naturally occurring nucleotides or can be comprised of at least one modified nucleotide, such as a 2′-O-methyl modified nucleotide, a nucleotide comprising a 5′-phosphorothioate group, and a terminal nucleotide linked to a cholesteryl derivative. Alternatively, the modified nucleotide may be chosen from the group of: a 2′-deoxy-2′-fluoro modified nucleotide, a 2′-deoxy-modified nucleotide, a locked nucleotide, an abasic nucleotide, 2′-amino-modified nucleotide, 2′-alkyl-modified nucleotide, morpholino nucleotide, a phosphoramidate, and a non-natural base comprising nucleotide. Generally, such modified sequence will be based on a first sequence of said dsRNA selected from the group consisting of the sense sequences of Tables 1 and Table 2 and a second sequence selected from the group consisting, of the antisense sequences of Tables 1, and Table 2.

[0013] In another embodiment, the invention provides a cell comprising one of the dsRNAs of the invention. The cell is generally a mammalian cell, such as a human cell.

[0014] in another embodiment, the invention provides a pharmaceutical composition for inhibiting the expression of the PCSK9 gene in an organism, generally a human subject, comprising one or more of the dsRNA of the invention and a pharmaceutically acceptable carrier or delivery vehicle.

[0015] In another embodiment, the invention provides a method for inhibiting the expression of the PCSK9 gene in a cell, comprising the following steps:
[0016] (a) introducing into the cell a double-stranded ribonucleic acid (dsRNA), wherein the dsRNA comprises at least two sequences that are complementary to each, other. The dsRNA comprises a sense strand comprising a first sequence and an antisense strand comprising a second sequence. The antisense strand comprises a region of complementarity which is substantially complementary to at least a part of a mRNA encoding PCSK9, and wherein the region of complementarity is less than 30 nucleotides in length, generally 19-24 nucleotides in length, and wherein the dsRNA, upon contact with a cell expressing the PCSK9, inhibits expression of the PCSK9 gene by at least 40%; and
[0017] (b) maintaining the cell produced in step (a) for a time sufficient to obtain degradation of the mRNA transcript of the PCSK9 gene, thereby inhibiting expression of the PCSK9 gene in the cell.

[0018] In another embodiment, the invention provides methods for treating, preventing or managing pathological processes which can be mediated by down regulating PCSK9 gene expression, e.g. hyperlipidemia, comprising administering to a patient in need of such treatment, prevention or management a therapeutically or prophylactically effective amount of one or more of the dsRNAs of the invention.

[0019] In another embodiment, the invention provides vectors for inhibiting the expression of the PCSK9 gene in a cell, comprising a regulatory sequence operably linked to a nucleotide sequence that encodes at least one strand of one of the dsRNA of the invention.

[0020] In another embodiment, the invention provides a cell comprising a vector for inhibiting the expression of the PCSK9 gene in a cell. The vector comprises a regulatory sequence operably linked to a nucleotide sequence mat encodes at least one strand of one of the dsRNA of the invention.

### BRIEF DESCRIPTION OF THE FIGURES

[0021] FIG. 1 shows the structure of the ND-98 lipid.

[0022] FIG. 2 shows the results of the in vivo screen of 16 mouse specific (AL-DP-9327 through AL-DP-9342) PCSK9 siRNAs directed against different ORF regions of PCSK9 mRNA (having the first nucleotide corresponding to the ORF position indicated on the graph) in C57/BL6 mice (5 animals/group). The ratio of PCSK9 mRNA to GAPDH mRNA in liver lysates was averaged over each treatment group and compared to a control group treated with PBS or a control group treated with an unrelated siRNA (blood coagulation factor VII).

[0023] FIG. 3 shows the results of the in vim screen of 16 human/mouse/rat crossreactive (AL-DP-9311 through AL-DP-9326) PCSK9 siRNAs directed against different ORF regions of PCSK9 mRNA (having the first nucleotide corresponding to the ORF position indicated on the graph) in C57/BL6 mice (5 animals/group). The ratio of PCSK9 mRNA, to GAPDH mRNA in liver lysates was averaged over each treatment group and compared to a control group treated with PBS or a control group treated with an unrelated siRNA (blood coagulation factor VII).

[0024] Silencing of PCSK9 mRNA resulted in lowering total serum cholesterol levels.

[0025] The most efficacious in terms of knocking down PCSK9 message siRNAs showed the most pronounced cholesterol lowering effect (around 20-30%).

[0026] FIG. 4 shows the results of the in vivo screen of 16 mouse specific (AL-DP-9327 through AL-DP-9342) PCSK9 siRNAs in C57/BL6 mice (5 animals/group). Total serum cholesterol levels were averaged over each treatment group and compared to a control group treated with PBS or a control group treated with an unrelated siRNA (blood coagulation factor VII).

[0027] FIG. 5 shows the results of the in viva screen of 16 human/mouse/rat crossreactive (AL-DP-9311 through AL-DP-9326) PCSK9 siRNAs in C57/BL6 mice (5 animals/group). Total serum cholesterol levels were averaged over each treatment group and compared to a control group treated with PBS or a control group treated with an unrelated siRNA (blood coagulation factor VII).

[0028] FIG. 6 shows a comparison of the in vitro and in vivo results for silencing PCSK9.

[0029] FIG. 7A and FIG. 7B show in vitro results for silencing PCSK9 using monkey primary hepatocytes.

[0030] FIG. 8 shows in vivo activity of LNP-01 formulated siRNAs to pcsk-9.

[0031] FIG. 9 shows in vivo activity of LNP-01 Formulated chemically modified 9314 and 10792 parent molecules at different times. Clearly modified versions of 10792 display in vivo silencing activity.

### DETAILED DESCRIPTION OF THE INVENTION

[0032] The invention provides a solution to the problem of treating diseases that can be modulated by the down regulation of the PCSK9 gene, by using double-stranded ribonucleic acid (dsRNA) to silence the PCSK9 gene thus providing treatment for diseases such as hyperlipidemia.

[0033] The invention provides double-stranded ribonucleic acid (dsRNA), as well as compositions and methods for inhibiting the expression of the PCSK9 gene in a cell or mammal using the dsRNA. The invention also provides compositions and methods for treating pathological conditions and diseases that can be modulated by down regulating the expression of the PCSK9 gene dsRNA directs the sequence-specific degradation of mRNA through a process known as RNA interference (RNAi).

[0034] The dsRNA of die invention comprises an RNA strand (the antisense strand) having a region which is less than 30 nucleotides in length, generally 19-24 nucleotides in length, and is substantially complementary to at least past of an mRNA transcript of the FCSK9 gene. The use of these dsRNAs enables the targeted degradation of an mRNA that is involved in sodium transport. Using cell-based and animal assays, the present inventors have demonstrated that very low dosages of these dsRNA can specifically and efficiently mediate RNAi, resulting in significant inhibition of expression of the PCSK9 gene. Thus, the methods and compositions of the invention comprising these dsRNAs are useful for treating pathological processes which can be mediated by down regulating PCSK9, such as in the treatment of hyperlipidemia.

[0035] The following detailed description discloses how to make and use the dsRNA and compositions containing dsRNA to inhibit the expression of the target FCSK9 gene, as well as compositions and methods for treating diseases that can be modulated by down regulating the expression of PCSK9, such as hyperlipidemia. The pharmaceutical compositions of the invention comprise a dsRNA having an antisense strand comprising a region of complementarity which is less than 30 nucleotides in length, generally 19-24 nucleotides in length, and is substantially complementary to at least part of an RNA transcript of the PCSK9 gene, together with a pharmaceutically acceptable carrier.

[0036] Accordingly, certain aspects of the invention provide pharmaceutical compositions comprising the dsRNA of the invention together with a pharmaceutically acceptable carrier, methods of using the compositions to inhibit expression of the PCSK9 gene, and methods of using the pharmaceutical compositions to treat diseases that can be modulated by down regulating the expression of PCSK9.

### I. DEFINITIONS

[0037] For convenience, the meaning of certain terms and phrases used in the specification, examples, and appended claims, are provided below. If there is an apparent discrepancy between the usage of a term in other parts of this specification and its definition provided in this section, the definition in this section shall prevail.

[0038] “G,” “C,” “A” and “U” each generally stand for a nucleotide that contains guanine, cytosine, adenine, and uracil as a base, respectively. However, it will be understood that the term “ribonucleotide” or “nucleotide” can also refer to a modified nucleotide, as further detailed below, or a surrogate replacement moiety. The skilled person is well aware that guanine, cytosine, adenine, and uracil may be replaced by other moieties without substantially altering the base pairing properties of an oligonucleotide comprising a nucleotide bearing such replacement moiety. For example, without limitation, a nucleotide comprising inosine as its base may base pair with nucleotides containing adenine, cytosine, or uracil. Hence, nucleotides containing uracil, guanine, or adenine may be replaced in the nucleotide sequences of the invention by a nucleotide containing, for example, inosine. Sequences comprising such replacement moieties are embodiments of the invention.

[0039] As used herein, “PCSK9” refers to the proprotein convertase subtilisin kexin 9 gene or protein (also known as FIB, HCHOLA3, NARC-1, NARC1), mRNA sequences to PCSK9 are provided as human: NM_{—}174936; mouse: NM_{—}153565, and rat: NM_{—}199253.

[0040] As used herein, “target sequence” refers to a contiguous portion of the nucleotide sequence of an mRNA molecule formed during the transcription of the PCSK9 gene, including mRNA that is a product of RNA processing of a primary transcription product.

[0041] As used herein, the term “strand comprising a sequence” refers to an oligonucleotide comprising a chain of nucleotides that is described by the sequence referred to using the standard nucleotide nomenclature.

[0042] As used herein, and unless otherwise indicated, the term “complementary,” when used to describe a first nucleotide sequence in relation to a second nucleotide sequence, refers to the ability of an oligonucleotide or polynucleotide comprising the first nucleotide sequence to hybridize and form a duplex structure under certain conditions with an oligonucleotide or polynucleotide comprising the second nucleotide sequence, as will be understood by the skilled person. Such conditions can, for example, be stringent conditions, where stringent conditions may include: 400 mM NaCl, 40 mM PIPES pH 6.4, 1 mM EDTA, 50° C. or 70° C. for 12-16 hours followed by washing. Other conditions, such as physiologically relevant conditions as may be encountered inside an organism, can apply. The skilled person will be able to determine the set of conditions most appropriate for a test of complementarity of two sequences in accordance with the ultimate application of the hybridized nucleotides.

[0043] This includes base-pairing of the oligonucleotide or polynucleotide comprising the first nucleotide sequence to the oligonucleotide or polynucleotide comprising the second nucleotide sequence over the entire length of the first and second nucleotide sequence. Such sequences can be referred to as “fully complementary” with respect to each other herein. However, where a first sequence is referred to as “substantially complementary” with respect to a second sequence herein, the two sequences can be fully complementary, or they may form one or more, but generally not more than 4, 3 or 2 mismatched base pairs upon hybridization, while retaining the ability to hybridize under the conditions most relevant to their ultimate application. However, where two oligonucleotides are designed to form, upon hybridization, one or more single stranded overhangs, such overhangs shall not be regarded as mismatches with regard to the determination of complementarity. For example, a dsRNA comprising one oligonucleotide 21 nucleotides in length and another oligonucleotide 23 nucleotides in length, wherein the longer oligonucleotide comprises a sequence of 21 nucleotides that is fully complementary to the shorter oligonucleotide, may yet be referred to as “fully complementary” for the purposes of the invention.

[0044] “Complementary” sequences, as used herein, may also include, or be formed entirely from, non-Watson-Crick base pairs and/or base pairs formed from non-natural and modified nucleotides, in as far as the above requirements with respect to their ability to hybridize are fulfilled.

[0045] The terms “complementary”, “fully complementary” and “substantially complementary” herein may be used with respect to the base matching between the sense strand and the antisense strand of a dsRNA, or between the antisense strand of a dsRNA and a target sequence, as will be understood from the context of their use.

[0046] As used herein, a polynucleotide which is “substantially complementary to at least part of” a messenger RNA (mRNA) refers to a polynucleotide which is substantially complementary to a contiguous portion of the mRNA of interest (e.g., encoding PCSK9). For example, a polynucleotide is complementary to at least a part of a PCSK9 mRNA if the sequence is substantially complementary to a non-interrupted portion of a mRNA encoding PCSK9.

[0047] The term “double-stranded RNA” or “dsRNA”, as used herein, refers to a complex of ribonucleic acid molecules, having a duplex structure comprising two anti-parallel and substantially complementary, as defined above, nucleic acid strands. The two strands forming the duplex structure may be different portions of one larger RNA molecule, or they may be separate RNA molecules. Where separate RNA molecules, such dsRNA are often referred to in the literature as siRNA (“short interfering RNA”). Where the two strands are part of one larger molecule, and therefore are connected by an uninterrupted chain, of nucleotides between the 3′-end of one strand and the 5′end of the respective other strand forming the duplex structure, the connecting RNA chain is referred to as a “hairpin loop”, “short hairpin RNA” or “shRNA”. Where the two strands are connected covalently by means other than an uninterrupted chain of nucleotides between the 3′-end of one strand and the 5′end of the respective other strand forming the duplex structure, the connecting structure is referred to as a “linker”. The RNA strands may have the same or a different number of nucleotides. The maximum number of base pairs is the number of nucleotides in the shortest strand of the dsRNA minus any overhangs that are present in the duplex. In addition to the duplex structure, a dsRNA may comprise one or more nucleotide overhangs. In addition, as used in this specification, “dsRNA” may include chemical modifications to ribonucleotides, including substantial modifications at multiple nucleotides and including all types of modifications disclosed herein or known in the art. Any such modifications, as used in an siRNA type molecule, are encompassed by “dsRNA” for the purposes of this specification and claims.

[0048] As used herein, a “nucleotide overhang” refers to the unpaired nucleotide or nucleotides drat protrude from the duplex structure of a dsRNA when a 3′-end of one strand of the dsRNA extends beyond the 5′-end of the other strand, or vice versa. “Blunt” or “blunt end” means that there are no unpaired nucleotides at that end of the dsRNA, i.e., no nucleotide overhang. A “blunt, ended” dsRNA is a dsRNA that is double-stranded over its entire length, i.e., no nucleotide overhang at either end of the molecule. For clarity, chemical caps or non-nucleotide chemical moieties conjugated to the 3′ end or 5′ end of an siRNA are not considered in determining whether an siRNA has an overhang or is blunt ended.

[0049] The term “antisense strand” refers to the strand of a dsRNA which includes a region that is substantially complementary to a target sequence. As used herein, the term “region of complementarity” refers to the region on the antisense strand that is substantially complementary to a sequence, for example a target sequence, as defined herein. Where the region of complementarity is not fully complementary to the target sequence, the mismatches are most tolerated in the terminal regions and, if present, are generally in a terminal region or regions, e.g., within 6, 5, 4, 3, or 2 nucleotides of the 5′ and/or 3′terminus.

[0050] The term “sense strand,” as used herein, refers to the strand of a dsRNA that includes a region that is substantially complementary to a region of the antisense strand.

[0051] “Introducing into a cell”, when referring to a dsRNA, means facilitating uptake or absorption into the cell, as is understood by those skilled in the art. Absorption or uptake of dsRNA can occur through unaided diffusive or active cellular processes, or by auxiliary agents or devices. The meaning of this term is not limited to cells in vitro; a dsRNA may also be “introduced into a cell”, wherein the cell is part of a living organism. In such instance, introduction into the cell will include the delivery to the organism. For example, for in vivo delivery, dsRNA can be injected into a tissue site or administered systemically. In vitro introduction into a cell includes methods known in the art such as electroporation and lipofection.

[0052] The terms “silence” and “inhibit the expression of”, in as far as they refer to the PCSK9 gene, herein refer to the at least partial, suppression of the expression of the PCSK9 gene, as manifested by a reduction of the amount of mRNA-transcribed from the PCSK9 gene which may be isolated from a first cell or group of cells in which the PCSK9 gene is transcribed and which has or have been treated such that the expression of the PCSK9 gene is inhibited, as compared to a second cell or group of cells substantially identical to the first cell or group of cells but which has or have not been so treated (control cells). The degree of inhibition is usually expressed in terms of

$$\frac{( mRNA in control cells ) - ( mRNA in treated cells )}{( mRNA in control cells )} \cdot 100 \%$$

[0053] Alternatively, the degree of inhibition may be given in terms of a reduction of a parameter that is functionally linked to PCSK9 gene transcription, e.g. the amount of protein encoded by the PCSK9 gene which is secreted by a cell, or the number of cells displaying a certain phenotype, e.g. apoptosis. In principle, PCSK9 gene silencing may be determined in any cell expressing the target, either constitutively or by genomic engineering, and by any appropriate assay. However, when a reference is needed in order to determine whether a given dsRNA inhibits the expression of the PCSK9 gene by a certain, degree and therefore is encompassed by the instant invention, the assay provided in the Examples below shall serve as such reference.

[0054] For example, in certain instances, expression of the PCSK9 gene is suppressed by at least about 20%, 25%, 35%, or 50% by administration of the double-stranded oligonucleotide of the invention, in some embodiment, the PCSK9 gene is suppressed by at least about 60%, 70%, or 80% by administration of the double-stranded oligonucleotide of the invention. In some embodiments, the PCSK9 gene is suppressed by at least about 85%, 90%, or 95% by administration of the double-stranded oligonucleotide of the invention. Tables 1, 2, provides a wide range of values for inhibition of expression obtained in an in vitro assay using various PCSK9 dsRNA molecules at various concentrations.

[0055] As used herein in the context of PCSK9 expression, the terms “treat”, “treatment”, and the like, refer to relief from or alleviation of pathological processes which, can be mediated by down regulating PCSK9 gene. In the context of the present invention insofar as it relates to any of the other conditions recited herein below (other than pathological processes which can be mediated by down regulating the PCSK9 gene), the terms “treat”, “treatment”, and the like mean to relieve or alleviate at least one symptom associated with such condition, or to slow or reverse the progression of such condition. For example, in the context of hyperlipidemia, treatment will involve a decrease in serum lipid levels.

[0056] As used herein, the phrases “therapeutically effective amount” and “prophylactically effective amount” refer to an amount that provides a therapeutic benefit in the treatment prevention, or management of pathological processes which can be mediated by down regulating the PCSK9 gene on or an overt symptom of pathological processes which can be mediated by down regulating the PCSK9 gene. The specific amount that is therapeutically effective can be readily determined by ordinary medical practitioner, and may vary depending on factors known in the art, such as, e.g. the type of pathological processes which, can be mediated by down regulating the PCSK9 gene, the patient's history and age, the stage of pathological processes which can be mediated by down regulating PCSK9 gene expression, and the administration of other anti-pathological processes which can be mediated by down regulating PCSK9 gene expression.

[0057] As used herein, a “pharmaceutical composition” comprises a pharmacologically effective amount of a dsRNA and a pharmaceutically acceptable carrier. As used herein, “pharmacologically effective amount,” “therapeutically effective amount” or simply “effective amount” refers to that amount of an RNA effective to produce the intended pharmacological, therapeutic or preventive result. For example, if a given clinical treatment is considered effective when there is at least a 25% reduction in a measurable parameter associated with a disease or disorder, a therapeutically effective amount of a drug for the treatment of that disease or disorder is the amount necessary to effect at least a 25% reduction in that parameter.

[0058] The term “pharmaceutically acceptable carrier” refers to a carrier for administration of a therapeutic agent. Such carriers include, but are not limited to, saline, buffered saline, dextrose, water, glycerol, ethanol, and combinations thereof and are described in more detail below. The term specifically excludes cell culture medium.

[0059] As used herein, a “transformed cell” is a cell into which a vector has been introduced from which a dsRNA molecule may be expressed.

### II. DOUBLE-STRAND RIBONUCLEIC ACID (dsRNA)

[0060] In one embodiment, the invention provides double-stranded ribonucleic acid (dsRNA) molecules for inhibiting the expression of the PCSK9 gene in a cell or mammal, wherein the dsRNA comprises an antisense strand comprising a region of complementarity which is complementary to at least a part of an mRNA formed in the expression of the PCSK9 gene, and wherein the region of complementarity is less than 30 nucleotides in length, generally 19-24 nucleotides in length, and wherein said dsRNA, upon contact with a cell expressing said PCSK9 gene, inhibits the expression of said PCSK9 gene by at least 40%. The dsRNA comprises two RNA strands that are sufficiently complementary to hybridise to form a duplex structure. One strand of the dsRNA (the antisense strand) comprises a region of complementarity that is substantially complementary, and generally fully complementary, to a target sequence, derived from the sequence of an mRNA formed during the expression of the PCSK9 gene, the other strand (the sense strand) comprises a region which is complementary to the antisense strand, such that the two strands hybridize and form a duplex structure when combined under suitable conditions. Generally, the duplex structure is between 15 and 30, more generally between 18 and 25, yet more generally between 19 and 24, and most generally between 19 and 21 base pairs in length. Similarly, the region of complementarity to the target sequence is between 15 and 30, more generally between 18 and 25, yet more generally between 19 and 24, and most generally between 19 and 21 nucleotides in length. The dsRNA of the invention may further comprise one or more single-stranded nucleotide overhang(s). Hie dsRNA can be synthesized by standard methods known in the art as further discussed, below, e.g., by use of an automated DNA synthesizer, such as are commercially available from, for example, Biosearch, Applied Biosystems, Inc. In a preferred embodiment, the PCSK9 gene is the human PCSK9 gene. In specific embodiments, the antisense strand of the dsRNA comprises a strand selected from the sense sequences of Tables 1 and 2, and a second sequence selected from the group consisting of the antisense sequences of Tables 1 and 2. Alternative antisense agents that target, elsewhere in the target sequence provided in Tables 1 and 2, can readily be determined using the target sequence and the flanking PCSK9 sequence.

[0061] in further embodiments, the dsRNA comprises at least one nucleotide sequence selected from the groups of sequences provided in Tables 1 and 2 in other embodiments, the dsRNA comprises at least two sequences selected from this group, wherein one of the at least two sequences is complementary to another of the at least two sequences, and one of the at least two sequences is substantially complementary to a sequence of ah mRNA generated in the expression of the PCSK9 gene. Generally, the dsRNA comprises two oligonucleotides, wherein one oligonucleotide is described as the sense strand in Tables 1 and 2 and the second oligonucleotide is described as the antisense strand in Tables 1 and 2

[0062] The skilled person is well aware that dsRNAs comprising a duplex structure of between 20 and 23, but specifically 21, base pairs have been hailed as particularly effective in inducing RNA interference (Elbashir et al., EMBO 2001, 20:6877-6888). However, others have found that shorter or longer dsRNAs can be effective as well, in the embodiments described above, by virtue of the nature of the oligonucleotide sequences provided in Tables 1 and 2, the dsRNAs of the invention can comprise at least one strand of a length, of minimally 2 lot it can be reasonably expected that shorter dsRNAs comprising one of the sequences of Tables 1 and 2 minus only a few nucleotides on one or both, ends may be similarly effective as compared to the dsRNAs described above. Hence, dsRNAs comprising a partial sequence of at least 15, 16, 17, 18, 19, 20, or more contiguous nucleotides from one of the sequences of Tables 1 and 2, and differing in their ability to inhibit the expression of the PCSK9 gene in a FACS assay as described herein below by not more than 5, 10, 15, 20, 25, or 30% inhibition from a dsRNA comprising the full sequence, are contemplated by the invention. Further dsRNAs that cleave within the target sequence provided in Tables 1 and 2 can readily be made using the PCSK9 sequence and the target sequence provided.

[0063] In addition, the RNAi agents provided in Tables 1 and 2 identify a site in the PCSK9 mRNA that is susceptible to RNAi based cleavage. As such the present invention further includes RNAi agents that target, within the sequence targeted by one of the agents of the present invention. As used herein a second RNAi agent is said to target within the sequence of a first RNAi agent if the second RNAi agent cleaves the message anywhere within the mRNA that is complementary to the antisense strand of the first RNAi agent. Such a second agent will generally consist of at least 15 contiguous nucleotides from one of the sequences provided in Tables 1 and 2 coupled to additional nucleotide sequences taken from the region contiguous to the selected sequence in the PCSK9 gene. For example, the last 15 nucleotides of SEQ ID NO:1 (minus the added AA sequences) combined with the next 6 nucleotides from the target PCSK9 gene produces a single strand agent of 21 nucleotides that is based on one of the sequences provided in Tables 1 and 2.

[0064] The dsRNA of the invention, can contain one or more mismatches to the target sequence. In a preferred embodiment, the dsRNA of the invention contains no more than 3 mismatches. If the antisense strand of the dsRNA contains mismatches to a target sequence, it is preferable that the area of mismatch not be located in the center of the region of complementarity. If the antisense strand of the dsRNA contains mismatches to the target sequence, it is preferable that the mismatch be restricted to 5 nucleotides from either end, for example 5, 4, 3, 2, or 1 nucleotide from either the 5′ or 3′ end of the region of complementarity. For example, for a 23 nucleotide dsRNA strand which is complementary to a region of the PCSK9 gene, the dsRNA generally does not contain any mismatch within the central 13 nucleotides. The methods described within the invention can be used to determine whether a dsRNA containing a mismatch to a target sequence is effective in inhibiting the expression of the PCSK9 gene. Consideration of the efficacy of dsRNAs with mismatches in inhibiting expression of the PCSK9 gene is important, especially if the particular region of complementarity in the PCSK9 gene is known to have polymorphic sequence variation within the population.

[0065] In one embodiment at least one end of the dsRNA has a single-stranded nucleotide overhang of 1 to 4, generally 1 or 2 nucleotides dsRNAs having at least one nucleotide overhang have unexpectedly superior inhibitory properties than their blunt-ended counterparts. Moreover, the present inventors have discovered that the presence of only one nucleotide overhang strengthens the interference activity of the dsRNA, without affecting its overall stability, dsRNA having only one overhang has proven particularly stable and effective in vivo, as well as in a variety of cells, cell culture mediums, blood, and serum. Generally, the single-stranded overhang is located, at the 3′-terminal end of the antisense strand or, alternatively, at the 3′-terminal end of the sense strand. The dsRNA may also have a blunt end, generally located at the 5′-end of the antisense strand. Such dsRNAs have improved stability and inhibitory activity, thus allowing administration at low dosages, i.e., less than 5 mg/kg body weight of the recipient per day. Generally, the antisense strand of the dsRNA has a nucleotide overhang at the 3′-end, and the 5′-end is blunt. In another embodiment, one or more of the nucleotides in the overhang is replaced with a nucleoside thiophosphate.

[0066] In yet another embodiment, the dsRNA is chemically modified to enhance stability. The nucleic acids of die invention may be synthesized and/or modified by methods well established in the art, such as those described in “Current protocols in nucleic acid chemistry”. Beaucage, S. L. et. al. (Edrs.), John Wiley & Sons, Inc., New York, N.Y., USA, which is hereby incorporated herein by reference. Chemical modifications may include, but are not limited to 2′ modifications, modifications at other sites of the sugar or base of an oligonucleotide, introduction of non-natural bases into the olibonucleotide chain, covalent attachment to a ligand or chemical moiety, and replacement of internucleotide phosphate linkages with alternate linkages such as thiophosphates. More than one such modification may be employed.

[0067] Chemical linking of the two separate dsRNA strands may be achieved by any of a variety of well-known techniques, for example by introducing covalent, ionic or hydrogen bonds; hydrophobic interactions, van der Waals or stacking interactions; by means of metal-ion coordination, or through, use of purine analogues. Generally, the chemical groups that can be used to modify the dsRNA include, without limitation, methylene blue; bifunctional groups, generally bis-(2-chloroethyl)amine; N-acetyl-N′-(p-glyoxylbenzoyl)cystamine; 4-thiouracil; and psoralen. In one embodiment, the linker is a hexa-ethylene glycol linker. In this case, the dsRNA are produced by solid phase synthesis and the hexa-ethylene glycol linker is incorporated according to standard methods (e.g., Williams, D. J., and K. B. Hail, Biochem. (1996) 35:14665-14670). In a particular embodiment, the 5-end of the antisense strand and the 3′-end of the sense strand are chemically linked via a hexaethylene glycol linker. In another embodiment, at least one nucleotide of the dsRNA comprises a phosphorothioate or phosphorodithioate groups. The chemical bond at the ends of the dsRNA is generally formed by triple-helix bonds. Tables 1 and 2 provides examples of modified RNAi agents of the invention.

[0068] In yet another embodiment, the nucleotides at one or both of the two single strands may be modified to prevent or inhibit the degradation activities of cellular enzymes, such, as, for example, without limitation, certain nucleases. Techniques for inhibiting the degradation activity of cellular enzymes against nucleic acids are known in the art including, but not limited to, 2′-amino modifications, 2′-amino sugar modifications, 2′-F sugar modifications, 2′-F modifications, 2′-alkyl sugar modifications, uncharged backbone modifications, morpholino modifications, 2′-methyl modifications, and phosphoramidate (sec, e.g., Wagner, Nat. Med. (1995) 1:1116-8). Thus, at least one 2′-hydroxyl group of the nucleotides on a dsRNA is replaced by a chemical group, generally by a 2′-amino or a 2′-methyl group. Also, at least one nucleotide may be modified to form a locked, nucleotide. Such locked nucleotide contains a methylene bridge that connects the 2′-oxygen of ribose with the 4′-carbon of ribose. Oligonucleotides containing the locked nucleotide are described in Koshkin, A. A., et al., Tetrahedron (1998), 54: 3607-3630) and Obika, S. et al. Tetrahedron Lett. (1998), 39; 5401-5404). Introduction of a locked nucleotide into an oligonucleotide improves the affinity for complementary sequences and increases the melting temperature by several degrees (Braasch, D. A. and D. R. Corey, Chem. Biol. (2001), 8:1-7).

[0069] Conjugating a ligand to a dsRNA can enhance its cellular absorption as well as targeting to a particular tissue or uptake by specific types of cells such as liver cells. In certain instances, a hydrophobic ligand is conjugated to the dsRNA to facilitate direct permeation of the cellular membrane and or uptake across the liver cells. Alternatively, the ligand conjugated, to the dsRNA is a substrate for receptor-mediated endocytosis. These approaches have been used to facilitate cell permeation of antisense oligonucleotides as well as dsRNA agents. For example, cholesterol has been conjugated to various antisense oligonucleotides resulting in compounds that are substantially more active compared to their non-conjugated analogs. See M. Manoharan Antisense & Nucleic Acid Drug Development 2002, 12, 103. Other lipophilic compounds that have been conjugated to oligonucleotides include 1-pyrene butyric acid, 1,3-bis-O-(hexadecyl)glycerol, and menthol. One example of a ligand for receptor-mediated endocytosis is folic acid. Folic acid enters the cell by folate-receptor-mediated endocytosis. dsRNA compounds bearing folic acid would be efficiently transported into the cell via the folate-receptor-mediated endocytosis. Li and coworkers report that attachment of folic acid to the 3′-terminus of an oligonucleotide resulted in an 8-fold increase in cellular uptake of the oligonucleotide. Li, S.; Deshmukh, H, M.; Huang, L. Pharm. Res. 1998, 15, 1540. Other ligands that have been conjugated to oligonucleotides include polyethylene glycols, carbohydrate clusters, cross-linking agents, porphyrin conjugates, delivery peptides and lipids such as cholesterol.

[0070] In certain instances, conjugation of a cationic ligand to oligonucleotides results in improved resistance to nucleases. Representative examples of cationic ligands are propylammonium and dimethylpropylammonium. Interestingly, antisense oligonucleotides were reported to retain their high binding affinity to mRNA when the cationic ligand was dispersed throughout the oligonucleotide. See M. Manoharan Antisense & Nucleic Acid Drug Development 2002, 22, 103 and references therein.

[0071] The ligand-conjugated dsRNA of the invention may be synthesized by the use of a dsRNA that bears a pendant reactive functionality, such as that derived from the attachment of a linking molecule onto the dsRNA. This reactive oligonucleotide may be reacted directly with commercially-available ligands, ligands that are synthesized bearing any of a variety of protecting groups, or ligands that have a linking moiety attached thereto. The methods of the invention facilitate the synthesis of ligand-conjugated dsRNA by the use of, in some preferred embodiments, nucleoside monomers that have been appropriately conjugated with ligands and that may further be attached to a solid-support material. Such ligand-nucleoside conjugates, optionally attached to a solid-support material, are prepared according to some preferred embodiments of the methods of the invention via reaction of a selected serum-binding ligand with a linking moiety located on the 5′ position of a nucleoside or oligonucleotide. In certain instances, an dsRNA bearing an aralkyl ligand attached to the 3′-terminus of the dsRNA is prepared by first covalently attaching a monomer building block to a controlled-pore-glass support via a long-chain aminoalkyl group. Then, nucleotides are bonded via standard solid-phase synthesis techniques to the monomer building-block bound to the solid support. The monomer building block may be a nucleoside or other organic compound that is compatible with solid-phase synthesis.

[0072] The dsRNA used in the conjugates of the invention may be conveniently and routinely made through the well-known technique of solid-phase synthesis. Equipment for such synthesis is sold by several vendors including, for example, Applied Biosystems (Foster City, Calif.). Any other means for such synthesis known in the art may additionally or alternatively be employed. It is also known to use similar techniques to prepare other oligonucleotides, such as the phosphorothioates and alkylated derivatives.

[0073] Teachings regarding the synthesis of particular modified oligonucleotides may be found in the following U.S. Pat. Nos. 5,138,045 and 5,218,105, drawn to polyamine conjugated oligonucleotides: U.S. Pat. No. 5,212,295, drawn to monomers for the preparation of oligonucleotides having chiral phosphorus linkages; U.S. Pat. Nos. 5,378,825 and 5,541,307, drawn to oligonucleotides having modified backbones; U.S. Pat. No. 5,386,023, drawn to backbone-modified oligonucleotides and the preparation thereof through reductive coupling; U.S. Pat. No. 5,457,191, drawn to modified nucleobases based on the 3-deazapurine ring system and methods of synthesis thereof; U.S. Pat. No. 5,459,255, drawn to modified nucleobases based on N-2 substituted purines; U.S. Pat. No. 5,521,302, drawn to processes for preparing oligonucleotides having chiral phosphorus linkages; U.S. Pat. No. 5,539,082, drawn to peptide nucleic acids; U.S. Pat. No. 5,554,746, drawn to oligonucleotides having β-lactam backbones; U.S. Pat. No. 5,571,902, drawn to methods and materials for the synthesis of oligonucleotides; U.S. Pat. No. 5,578,718, drawn to nucleosides having alkylthio groups, wherein such groups may be used as linkers to other moieties attached at any of a variety of positions of the nucleoside; U.S. Pat. Nos. 5,587,361 and 5,599,797, drawn to oligonucleotides having phosphorothioate linkages of high chiral purity; U.S. Pat. No. 5,506,351, drawn to processes for the preparation of 2′-O-alkyl guanosine and related compounds, including 2,6-diaminopurine compounds; U.S. Pat. No. 5,587,469, drawn to oligonucleotides having N-2 substituted purines; U.S. Pat. No. 5,587,470, drawn to oligonucleotides having 3-deazapurines; U.S. Pat. No. 5,223,168, and U.S. Pat. No. 5,608,046, both drawn to conjugated 4′-desmethyl nucleoside analogs; U.S. Pat. Nos. 5,602,240, and 5,610,289, drawn to backbone-modified oligonucleotide analogs; U.S. Pat. Nos. 6,262,241, and 5,459,255, drawn to, inter alia, methods of synthesizing 2′-fluoro oligonucleotides.

[0074] In the ligand-conjugated dsRNA and ligand-molecule bearing sequence-specific linked nucleosides of the invention, the oligonucleotides and oligonucleosides may be assembled on a suitable DNA synthesizer utilizing standard nucleotide or nucleoside precursors, or nucleotide or nucleoside conjugate precursors that already bear the linking moiety, ligand-nucleotide or nucleoside-conjugate precursors that already bear the ligand molecule, or non-nucleoside ligand-bearing building blocks.

[0075] When using nucleotide-conjugate precursors that already hear a linking moiety, die synthesis of the sequence-specific linked nucleosides is typically completed, and the ligand molecule is then reacted with the linking moiety to form the ligand-conjugated oligonucleotide. Oligonucleotide conjugates bearing a variety of molecules such as steroids, vitamins, lipids aid reporter molecules, has previously been described (see Manoharan et al. PCT Application WO 93/07883). In a preferred embodiment, the oligonucleotides or linked nucleosides of the invention are synthesized by an automated synthesizer using phosphoramidites derived from ligand-nucleoside conjugates in addition to the standard phosphoramidites and non-standard phosphoramidites that are commercially available and routinely used in oligonucleotide synthesis.

[0076] The incorporation of a 2′-O-methyl 2′-O-ethyl, 2′-O-propyl 2′-O-allyl, 2-O-aminoalkyl or 2′-deoxy-2′-fluoro group in nucleosides of an oligonucleotide confers enhanced hybridization properties to the oligonucleotide. Further, oligonucleotides containing phosphorothioate backbones have enhanced nuclease stability. Thus, functionalized, linked nucleosides of the invention can be augmented to include either or both a phosphorothioate backbone or a 2′-O-methyl, 2, —O-ethyl, 2-O-propyl, 2′-O-aminoalkyl, 2-O-allyl or 2′-deoxy-2′-fluoro group. A summary listing of some of the oligonucleotide modifications known in the art is found at, for example, PCT Publication WO 200370918.

[0077] In some embodiments, functionalized nucleoside sequences of the invention possessing an amino group at the 5-terminus are prepared using a DNA synthesizer, and then reacted with an active ester derivative of a selected ligand. Active ester derivatives are well known to those skilled in the art. Representative active esters include N-hydroxsuccinimide esters, tetrafluorophenolic esters, pentafluorophenolic esters and pentachlorophenolic esters. The reaction of the amino group and the active ester produces an oligonucleotide in which the selected ligand is attached to the S′-position through a linking group. The amino group at the 5′-terminus can be prepared utilizing a S′-Amino-Modifier C6 reagent. In one embodiment, ligand molecules may be conjugated to oligonucleotides at the 5′-position by the use of a ligand-nucleoside phosphoramidite wherein the ligand is linked to the 5′-hydroxy group directly or indirectly via a linker. Such ligand-nucleoside phosphoramidites are typically used at the end of an automated synthesis procedure to provide a ligand-conjugated oligonucleotide bearing the ligand at the 5′-terminus.

[0078] Examples of modified internucleoside linkages or backbones include, for example, phosphorothioates, chiral phosphorothioates, phosphorodithioates, phosphotriesters, aminoalkylphosphotriesters, methyl and other alkyl phosphonates including 3′-alkylene phosphonates and chiral phosphonates, phosphinates, phosphoramidates including 3′-amino phosphoramidate and aminoalkylphosphoramidates, thionophosphoramidates, thionoalkylphosphonates, thionoalkylphosphotriesters, and boranophosphates having normal 3-5′ linkages, 2′-5′ linked analogs of these, and those having inverted polarity wherein the adjacent pairs of nucleoside units are linked 3′-5 to 5′-3′ or 2′-5′ to 5-2′. Various salts, mixed salts and free-acid forms are also included.

[0079] Representative United States patents relating to the preparation of the above phosphorus-atom-containing linkages include, but are not limited to, U.S. Pat. Nos. 3,687,808; 4,469,863; 4,476,301; 5,023,243; 5,177,196; 5,188,897; 5,264,423; 5,276,019; 5,278,302; 5,286,717; 5,321,131; 5,399,676; 5,405,939; 5,453,496; 5,455,233; 5,466,677; 5,476,925; 5,519,126; 5,536,821; 5,541,306; 5,550,111; 5,563,253; 5,571,799; 5,587,361; 5,625,050; and 5,697,248, each of which is herein incorporated by reference.

[0080] Examples of modified internucleoside linkages or backbones that do not include a phosphorus atom therein (i.e., oligonucleosides) have backbones that are formed by short chain alkyl or cycloalkyl intersugar linkages, mixed heteroatom and alkyl or cycloalkyl intersugar linkages, or one or more short chain heteroatomic or heterocyclic intersugar linkages. These include those having morpholino linkages (formed in part from the sugar portion of a nucleoside); siloxane backbones; sulfide, sulfoxide and sulfone backbones; formacetyl and thioformacetyl backbones; methylene formacetyl and thioformacetyl backbones; alkene containing backbones; sulfamate backbones; methyleneimino and methylenehydrazino backbones; sulfonate and sulfonamide backbones; amide backbones; and others having mixed N, O, S and CH₂ component parts.

[0081] Representative United States patents relating to the preparation of the above oligonucleosides include, but are not limited to, U.S. Pat. Nos. 5,034,506; 5,166,315; 5,185,444; 5,214,134; 5,216,141; 5,235,033; 5,264,562; 1264,564; 5,405,938; 5,434,257; 5,466,677; 5,470,967; 5,489,677; 5,541,307; 5,561,225; 5,596,086; 5,602,240; 5,610,289; 5,602,240; 5,608,046; 5,610,289; 5,618,704; 5,623,070; 5,663,312; 5,633,360; 5,677,437; and 5,677,439, each of which is herein incorporated by reference.

[0082] In certain instances, the oligonucleotide may be modified by a non-ligand group. A number of non-ligand molecules have been conjugated to oligonucleotides in order to enhance the activity, cellular distribution or cellular uptake of the oligonucleotide, and procedures for performing such conjugations are available in the scientific literature. Such non-ligand moieties have included lipid moieties, such as cholesterol (Letsinger et al., Proc. Natl. Acad. Sci. USA, 1989, 86:6553), cholic acid (Manoharan et al., Bioorg. Med. Chem. Lett., 1994, 4:1053), a thioether, e.g., hexyl-5-tritylthiol (Manoharan et al., Ann. N.Y. Acad. Sci., 1992, 660:306; Manoharan et al., Bioorg. Med. Chem. Let, 1993, 3:2765), a thiocholesterol (Oberhauser et al., Nucl. Acids Res., 1992, 20:533), an aliphatic chain, e.g., dodecandiol or undecyl residues (Saison-Behmoaras et al., EMBO J., 1991, 10:111; Kabanov et al., FEBS Lett, 1990, 259:327; Svinarchuk et al., Biochimie, 1993, 75:49), a phospholipid, e.g., di-hexadecyl-rac-glycerol or triethylammonium 1,2-di-O-hexadecyl-rac-glycero-3-H-phosphonate (Manoharan et al. Tetrahedron Lett., 1995, 36:3651; Shea et al.,Noel. Acids Res., 1990, 18:3777), a poly amine or a polyethylene glycol chain (Manoharan et al., Nucleosides & Nucleotides, 1995, 14:969), or adamantane acetic acid (Manoharan et al. Tetrahedron Lett., 1995, 36:3651), a palmityl moiety (Mishra et al. Biochim. Biophys. Acta, 1995, 1264:229), or an octadecylamine or hexylamino-carbonyl-oxycholesterol moiety (Crooks et al., J. Pharmacol Exp. Ther., 1996, 277:923). Representative United States patents that teach the preparation of such oligonucleotide conjugates have been listed above. Typical conjugation protocols involve the synthesis of oligonucleotides bearing an aminolinker at one or more positions of the sequence. The amino group is then reacted with the molecule being conjugated using appropriate coupling or activating reagents. The conjugation reaction may be performed either with the oligonucleotide still bound to the solid support or following cleavage of the oligonucleotide in solution phase. Purification of the oligonucleotide conjugate by HPLC typically affords the pure conjugate. The use of a cholesterol conjugate is particularly preferred since such a moiety can increase targeting liver cells, a site of PCSK9 expression.

[0083] Vector Encoded RNAi Agents

[0084] The dsRNA of the invention can also be expressed from recombinant viral vectors intracellularly in vivo. The recombinant viral vectors of the invention comprise sequences encoding the dsRNA of the invention and any suitable promoter for expressing the dsRNA sequences. Suitable promoters include, for example, the U6 or H1 RNA pol III promoter sequences and the cytomegalovirus promoter. Selection of other suitable promoters is within the skill in the art. The recombinant viral vectors of the invention can also comprise inducible or regulatable promoters for expression of the dsRNA in a particular tissue or in a particular intracellular environment. The use of recombinant viral vectors to deliver dsRNA of the invention to cells in vivo is discussed in more detail below.

[0085] dsRNA of the invention can be expressed from a recombinant viral vector either as two separate, complementary RNA molecules, or as a single RNA molecule with two complementary regions.

[0086] Any viral vector capable of accepting the coding sequences for the dsRNA molecule(s) to be expressed can be used, for example vectors derived from adenovirus (AV); adeno-associated virus (AAV); retroviruses (e.g., lentiviruses (LV), Rhabdoviruses, murine leukemia virus); herpes virus, and the like. The tropism of viral vectors can be modified by pseudotyping the vectors with envelope proteins or other surface antigens from other viruses, or by substituting different viral capsid proteins, as appropriate.

[0087] For example, lentiviral vectors of the invention can be pseudotyped with surface proteins from vesicular stomatitis virus (VSV), rabies, Ebola, Mokola, and the like. AAV vectors of the invention can be made to target different cells by engineering the vectors to express different capsid protein serotypes. For example, an AAV vector expressing a serotype 2 capsid on a serotype 2 genome is called AAV 2/2. This serotype 2 capsid gene in the AAV 2/2 vector can be replaced by a serotype 5 capsid gene to produce an AAV 2/5 vector. Techniques for constructing AAV vectors which express different capsid protein serotypes are within the skill in the art; see, e.g., Rabinowitz J E et al. (2002), J Virol 76:791-801, the entire disclosure of which is herein incorporated by reference.

[0088] Selection of recombinant viral vectors suitable for use in the invention, methods for inserting nucleic acid sequences for expressing the dsRNA into the vector, and methods of delivering the viral vector to the cells of interest are within the skill in the art. See, for example, Dornburg R (1995), Gene Therap. 2: 301-310; Eglitis M A (1988), Biotechniques 6: 608-614; Miller A D (1990), Hum Gene Therap. 1: 5-14; Anderson W F (1998), Nature 392; 25-30; and Rubinson D A et al., Nat. Genet. 33: 401-406, the entire disclosures of which are herein incorporated by reference.

[0089] Preferred viral vectors are those derived from AV and AAV. In a particularly preferred embodiment, the dsRNA of the invention is expressed as two separate, complementary single-stranded RNA molecules from a recombinant AAV vector comprising, for example, either the U6 or H1 RNA promoters, or the cytomegalovirus (CMV) promoter.

[0090] A suitable AV vector for expressing the dsRNA of the invention, a method for constructing the recombinant AV vector, and a method for delivering the vector into target cells, are described in Xia H et al. (2002), Nat. Biotech, 20; 1006-1010.

[0091] Suitable AAV vectors for expressing the dsRNA of the invention, methods for constructing the recombinant AV vector, and methods for delivering the vectors into target cells are described in Samulski R et al. (1987), J. Virol. 61: 3096-3101; Fisher K J et al. (1996), J. Virol, 70: 520-532; Samulski R et al. (1989), J. Virol. 63: 3822-3826; U.S. Pat. No. 5,252,479; U.S. Pat. No. 5,139,941; International Patent Application No. WO 94/13788; and international Patent Application No. WO 93/24641, the entire disclosures of which are herein incorporated by reference.

[0092] III. PHARMACEUTICAL COMPOSITIONS COMPRISING dsRNA

[0093] In one embodiment, the invention provides pharmaceutical compositions comprising a dsRNA, as described herein, and a pharmaceutically acceptable carrier. The pharmaceutical composition comprising the dsRNA is useful for treating a disease or disorder associated with the expression or activity of the PCSK9 gene, such as pathological processes which, can be mediated by down regulating PCSK9 gene expression, such as hyperlipidemia. Such pharmaceutical compositions are formulated, based on the mode of delivery. One example is compositions that are formulated for delivery to the liver via parenteral delivery.

[0094] The pharmaceutical compositions of the invention are administered in dosages sufficient to inhibit expression of the PCSK9 gene. The present inventors have found that, because of their improved efficiency, compositions comprising the dsRNA of the invention can be administered at surprisingly low dosages. A dosage of 5 mg dsRNA per kilogram body weight of recipient per day is sufficient to inhibit or suppress expression of the PCSK9 gene and may be administered systematically to the patient.

[0095] In general, a suitable dose of dsRNA will be in the range of 0.01 to 5.0 milligrams per kilogram body weight of the recipient per day, generally in the range of 1 microgram to 1 mg per kilogram body weight per day. The pharmaceutical composition may be administered once daily, or the dsRNA may be administered as two, three, or more sub-closes at appropriate intervals throughout the day or even using continuous infusion or delivery through a controlled release formulation. In that case, the dsRNA contained in each sub-dose must be correspondingly smaller in order to achieve the total daily dosage. The dosage unit can also the compounded for delivery over several days, e.g., using a conventional sustained release formulation which provides sustained release of the dsRNA over a several day period. Sustained release formulations are well known in the art.

[0096] The skilled artisan will appreciate that certain factors may influence the dosage and timing required to effectively treat a subject, including but not limited to the severity of the disease or disorder, previous treatments, the general health and/or age of the subject, and other diseases present. Moreover, treatment of a subject with a therapeutically effective amount of a composition can include a single treatment or a series of treatments. Estimates of effective dosages and in vivo half-lives for the individual dsRNAs encompassed by the invention can be made using conventional methodologies or on the basis of in vivo testing using an appropriate animal model, as described elsewhere herein.

[0097] Advances in mouse genetics have generated a number of mouse models for the study of various human diseases, such as pathological processes which can be mediated by down regulating PCSK9 gene expression. Such models are used for in vivo testing of dsRNA, as well as for determining a therapeutically effective dose.

[0098] Any method can be used to administer a dsRNA of the present invention to a mammal. For example, administration can be direct; oral; or parenteral (e.g., by subcutaneous, intraventricular, intramuscular, or intraperitoneal injection, or by intravenous drip). Administration can be rapid (e.g., by injection), or can occur over a period of time (e.g., by slow infusion or administration of slow release formulations).

[0099] Typically, when treating a mammal with hyperlipidemia, the dsRNA molecules are administered systemically via parental means. For example, dsRNAs, conjugated or unconjugate or formulated with or without liposomes, can be administered intravenously to a patient. For such, a dsRNA molecule can be formulated into compositions such as sterile and non-sterile aqueous solutions, non-aqueous solutions in common solvents such as alcohols, or solutions in liquid or solid oil bases. Such solutions also can contain buffers, diluents, and other suitable additives. For parenteral, intrathecal, or intraventricular administration, a dsRNA molecule can be formulated into compositions such as sterile aqueous solutions, which also can contain buffers, diluents, and other suitable additives (e.g., penetration enhancers, carrier compounds, and other pharmaceutically acceptable carriers).

[0100] In addition, dsRNA molecules can be administered to a mammal as biologic or abiologic means as described in, for example, U.S. Pat. No. 6,271,359, Abiologic delivery can be accomplished by a variety of methods including, without limitation, (1) loading liposomes with a dsRNA acid molecule provided herein and (2) complexing a dsRNA molecule with lipids or liposomes to form nucleic acid-lipid or nucleic acid-liposome complexes. The liposome can be composed of cationic aid neutral lipids commonly used to transfect cells in vitro. Cationic lipids can complex (e.g., charge-associate) with negatively charged nucleic acids to form liposomes. Examples of cationic liposomes include, without limitation, lipofectin, lipofectamine, lipofectace, and DOTAP. Procedures for forming liposomes are well, known in the art. Liposome compositions can be formed, for example, from phosphatidylcholine, dimyristoyl phosphatidylcholine, dipalmitoyl phosphatidylcholine, dimyristoyl phosphatidyl glycerol or dioleoyl phosphatidylethanolamine. Numerous lipophilic agents are commercially available, including Lipofectin®, (Invitrogen/Life Technologies, Carlsbad, Calif.) and Effectene™, (Qiagen, Valencia, Calif.). In addition, systemic delivery methods can be optimized using commercially available cationic lipids such as DDAB or DOTAP, each of which can be mixed with a neutral lipid such as DOPE or cholesterol. In some cases, liposomes such as those described by Templeton et al. (Nature Biotechnology, 15: 647-652 (1997)) can be used. In other embodiments, polycations such as polyethyleneimine can be used to achieve delivery in vivo and ex vivo (Boletta et al., J. Am. Soc. Nephrol. 7: 1728 (1996)). Additional information regarding the use of liposomes to deliver nucleic acids can be found in U.S. Pat. No. 6,271,359, PCT Publication WO 96/40964 and Morrissey, D. et al. 2005, Nat Biotechnol. 23(8): 1002-7.

[0101] Biologic delivery can be accomplished by a variety of methods including, without limitation, the use of viral vectors. For example, viral vectors (e.g., adenovirus and herpesvirus vectors) can be used to deliver dsRNA molecules to liver cells. Standard molecular biology techniques can be used to introduce one or more of the dsRNAs provided herein into one of the many different viral vectors previously developed to deliver nucleic acid to cells. These resulting viral vectors can be used to deliver the one or more dsRNAs to cells by, for example, infection.

[0102] dsRNAs of the present invention can be formulated in a pharmaceutically acceptable carrier or diluent. A “pharmaceutically acceptable carrier” (also referred to herein as an “excipient”) is a pharmaceutically acceptable solvent, suspending agent, or any other pharmacologically inert vehicle. Pharmaceutically acceptable carriers can be liquid or solid, and can be selected with the planned manner of administration in mind so as to provide for the desired bulk, consistency, and other pertinent transport and chemical properties. Typical pharmaceutically acceptable carriers include, by way of example and not limitation; water; saline solution; binding agents (e.g., polyvinylpyrrolidone or hydroxypropyl methylcellulose); fillers (e.g., lactose and other sugars, gelatin, or calcium sulfate); lubricants (e.g., starch, polyethylene glycol, or sodium acetate); disintegrates (e.g., starch or sodium starch glycolate); and wetting agents (e.g., sodium, lauryl sulfate).

[0103] In addition, dsRNA that target the PCSK9 gene can be formulated into compositions containing the dsRNA admixed, encapsulated, conjugated, or otherwise associated with other molecules, molecular structures, or mixtures of nucleic acids. For example, a composition containing one or more dsRNA agents that target the PCSK9 gene can contain other therapeutic agents such as other lipid lowering agents (e.g., statins).

[0104] Methods for Treading Diseases that can be Modulated by Down Regulating the Expression of PCSK9

[0105] The methods and compositions described herein can be used to treat diseases and conditions that can be modulated by down regulating PCSK9 gene expression. For example, the compositions described herein can be used to treat hyperlipidemia and other forms of lipid inbalance such as hypercholesterolemia, hypertriglyceridemia and the pathological conditions associated with these disorders such as heart and circulatory diseases.

[0106] Methods for Inhibiting Expression of the PCSK9 Gene

[0107] In yet another aspect, the invention provides a method for inhibiting the expression of the PCSK9 gene in a mammal. The method comprises administering a composition of the invention to the mammal such that expression of the target PCSK9 gene is silenced. Because of their high specificity, the dsRNAs of the invention specifically target RNAs (primary or processed) of the target PCSK9 gene. Compositions and methods for inhibiting the expression of these PCSK9 genes using dsRNAs can be performed as described elsewhere herein.

[0108] In one embodiment, the method comprises administering a composition comprising a dsRNA, wherein the dsRNA comprises a nucleotide sequence which is complementary to at least a part of an RNA transcript of the PCSK9 gene of the mammal to be treated. When the organism to be treated is a mammal such as a human, the composition may be administered by any means known in the art including, but not limited to oral or parenteral routes, including intravenous, intramuscular, subcutaneous, transdermal, airway (aerosol) administration. In preferred embodiments, the compositions are administered by intravenous infusion or injection.

[0109] Unless otherwise defined, all technical and scientific terms used herein have the same meaning as commonly understood by one of ordinary skill in the art to which this invention belongs. Although methods and materials similar or equivalent to those described herein can be used in the practice or testing of the invention, suitable methods and materials are described below. Ail publications, patent applications, patents, and other references mentioned herein are incorporated by reference in their entirety. In case of conflict, the present specification, including definitions, will control, in addition, the materials, methods, and examples are illustrative only and not intended to be limiting.

### EXAMPLES

### Gene Walking of the FCSK9 Gene

[0110] siRNA design was carried out to identity in two separate selections

[0111] a) siRNAs targeting PCSK9 human and either mouse or rat mRNA and

[0112] b) all human reactive siRNAs with predicted specificity to the target gene PCSK9.

[0113] mRNA sequences to human, mouse and rat PCSK9 were used: Human sequence NM_{—174936.2} was used as reference sequence during the complete siRNA selection procedure.

[0114] 19 mer stretches conserved in human and mouse, and human and rat PCSK9 mRNA sequences were identified in the first step, resulting in the selection of siRNAs crossreactive to human and mouse, and siRNAs crossreactive to human and rat targets

[0115] SiRNAs specifically targeting human. PCSK9 were identified in a second selection. All potential 19mer sequences of human PCSK9 were extracted and defined as candidate target sequences. Sequences cross-reactive to human, monkey, and those cross-reactive to mouse, rat, human and monkey are all listed in Tables 1 and 2. Chemically modified versions of those sequences and their activity in both in vitro and in vivo assays are also listed in tables 1 and 2 and examples given in FIGS. 2-8.

[0116] In order to rank candidate target sequences and their corresponding siRNAs and select appropriate ones, their predicted potential for interacting with irrelevant targets (off-target potential) was taken as a ranking parameter. siRNAs with low off-target potential were defined as preferable and assumed to be more specific in vivo.

[0117] For predicting siRNA-specific off-target potential, the following assumptions were made;

[0118] 1) positions 2 to 9 (counting 5′ to 3′) of a strand (seed region) may contribute more to off-target potential than rest of sequence (non-seed, and cleavage site region)

[0119] 2) positions 10 and 11 (counting 5′ to 3′) of a strand (cleavage site region) may contribute more to off-target potential than non-seed region

[0120] 3) positions 1 and 19 of each strand are not relevant for off-target interactions

[0121] 4) an off-target score can be calculated for each gene and each strand, based on complementarity of siRNA strand sequence to the gene's sequence and position of mismatches

[0122] 5) number of predicted off-targets as well as highest off-target score must be considered for off-target potential

[0123] 6) off-tar get scores are to be considered more relevant for off-target potential than numbers of off-targets

[0124] 7) assuming potential abortion of sense strand activity by internal modifications introduced, only off-target potential of antisense strand will be relevant

[0125] To identify potential off-target genes, 19mer candidate sequences were subjected to a homology search against publically available human mRNA sequences.

[0126] The following off-target properties for each 19mer input sequence were extracted for each, off-target gene to calculate the off-target score:

[0127] Number of mismatches in non-seed region

[0128] Number of mismatches in seed region

[0129] Number of mismatches in cleavage site region

[0130] The off-target score was calculated for considering assumption 1 to 3 as follows:

[0131] Off-target score number of seed mismatches*10

[0132] + number of cleavage site mismatches*1.2

[0133] + number of non-seed mismatches*1

[0134] The most relevant off-target gene for each siRNA corresponding to the input 19mer sequence was defined as the gene with the lowest off-target score. Accordingly, the lowest off-target score was defined as the relevant off-target score for each siRNA.

[0135] dsRNA Synthesis

[0136] Source of Reagents

[0137] Where the source of a reagent is not specifically given herein, such reagent may be obtained from any supplier of reagents for molecular biology at a quality/purity standard for application in molecular biology.

[0138] siRNA Synthesis

[0139] Single-stranded RNAs were produced by solid phase synthesis on a scale of 1 μmole using an Expedite 8909 synthesizer (Applied Biosystems, Applera Deutschland GmbH, Darmstadt, Germany) and controlled pore glass (CPG, 500 Å, Proligo Biochemie GmbH, Hamburg, Germany) as solid support. RNA and RNA containing 2′-O-methyl nucleotides were generated by solid phase synthesis employing the corresponding phosphoramidites and 2-O-methyl phosphoramidites, respectively (Proligo Biochemie GmbH, Hamburg, Germany). These, building blocks were incorporated at selected sites within the sequence of the oligoribonucleotide chain using standard nucleoside phosphoramidite chemistry such as described in Current, protocols in nucleic acid chemistry, Beaucage, S. L. et al. (Edrs.), John Wiley & Sons, Inc., New York, N.Y., USA, Phosphorothioate linkages were introduced by replacement of the iodine oxidizer solution with a solution of the Beaucage reagent (Chruachem Ltd, Glasgow, UK) in acetonitrile (1%). Further ancillary reagents were obtained from Mallinckrodt Baker (Griesheim, Germany).

[0140] Deprotection and purification of the crude oligoribonucleotides by anion exchange HPLC were carried, out according to established procedures. Yields and concentrations were determined by UV absorption of a solution of the respective RNA at a wavelength, of 260 nm using a spectral photometer (DU 640B, Beckman Coulter GmbH, Unterschleiβheim, Germany), Double stranded RNA was generated, by mixing an equimolar solution of complementary strands, in annealing buffer (20 mM sodium phosphate, pH 6.8; 100 mM sodium chloride), healed in a water bath at 85-90° C. for 3 minutes and cooled to room temperature over a period of 3-4 hours. The annealed RNA solution was stored at −20° C. until use.

[0141] For the synthesis of 3′-cholesterol-conjugated siRNAs (herein referred to as -Chol-3′), an appropriately modified solid support was used for RNA synthesis. The modified solid support was prepared as follows:

### Diethyl-2-azabutane-1,4-dicarboxylate AA

[chemical structure]

[0143] A 4.7 M aqueous solution of sodium hydroxide (50 mL) was added into a stirred, ice-cooled solution of ethyl glycinate hydrochloride (32.19 g, 0.23 mole) in water (50 mL). Then, ethyl acrylate (23.1 g, 0.23 mole) was added and the mixture was stirred at room temperature until completion of the reaction was ascertained by TLC. After 19 h the solution was partitioned with dichloromethane (3×100 mL). The organic layer was dried with anhydrous sodium sulfate, filtered and evaporated. The residue was distilled to afford AA (28.8 g, 61%).

### 3-{Ethoxycarbonylmethyl-[6-(9H-fluoren-9-ylmethoxycarbonyl-amino)-hexanoyl]-amino}-propionic acid ethyl ester AB

[chemical structure]

[0145] Fmoc-6-amino-hexanoic acid (9.12 g, 25.83 mmol) was dissolved in dichloromethane (50 mL) and cooled with ice. Diisopropylcarbodiimide (3.25 g, 3.99 mL, 25.83 mmol) was added to the solution at 0° C. It was then followed by the addition of Diethyl-azabutane-1,4-dicarboxylate (5 g, 24.6 mmol) and dimethylamino pyridine (0.305 g> 2.5 mmol). The solution was brought to room temperature and stirred further: for 6 h. Completion of the reaction was ascertained by TLC. The reaction mixture was concentrated under vacuum and ethyl acetate was added to precipitate diisopropyl urea. The suspension was filtered. The filtrate was washed with 5% aqueous hydrochloric acid, 5% sodium bicarbonate and water. The combined organic layer was dried over sodium sulfate and concentrated to give the crude product which was purified by column chromatography (50% EtOAC/Hexanes) to yield 11.87 g (88%) of AB.

### 3[(6-Amino-hexanoyl)-ethoxycarbonylmethyl-amino]-propionic acid ethyl ester AC

[chemical structure]

[0147] 3-{Ethoxycarbonylmethyl-[6-(9H-fluoren-9-ylmethoxycarbonylamino)-hexanoyl]-amino}-propionic acid ethyl ester AB (11.5 g, 21.3 mmol) was dissolved in 20% piperidine in dimethylformamide at 0° C. The solution was continued stirring for 1 h. The reaction mixture was concentrated under vacuum, water was added to the residue, and the product was extracted with ethyl acetate. The crude product was purified by conversion into its hydrochloride salt.

### 3-({6-[17-(1,5-Dimethylhexyl)-10,13-dimethyl-2,3,4,7,8,9,10,11,12,13,14,15,16,17-tetradecahydro-1H-cyclopenta[a]phenanthren-3-yloxycarbonylamino]-hexanoyl}ethoxycarbonylmethyl-amino)-propionic acid ethyl ester AD

[chemical structure]

[0149] The hydrochloride salt of 3-[(6-Amino-hexanoyl)-ethoxycarbonylmethyl-amino]-propionic acid ethyl ester AC (4.7 g, 14.8 mmol) was taken up in dichloromethane. The suspension was cooled to 0° C. on ice. To the suspension diisopropylethylamine (3.87 g, 5.2 mL, 30 mmol) was added. To the resulting solution cholesteryl chloroformate (6.675 g, 14.8 mmol) was added. The reaction mixture was stirred overnight. The reaction mixture was diluted with dichloromethane and washed with 10% hydrochloric acid. The product was purified by flash chromatography (10.3 g, 92%).

### 1-{6-[17-(1,5-Dimethyl-hexyl)-10,13-dimethyl-2,3,4,7,8,9,10,11,12,13,14,15,16,17-tetradecahydro-1H-cyclopenta[a] phenanthren-3-yloxycarbonylamino]hexanoyl}-4-oxo-pyrrolidine-3-carboxylic acid ethyl ester AE

[chemical structure]

[0151] Potassium t-butoxide (1.1 g, 9.8 mmol) was slurried in 30 mL of dry toluene. The mixture was cooled to 0° C. on ice and 5 g (6.6 mmol) of diester AD was added slowly with stirring within 20 mins. The temperature was kept below 5° C. during the addition. The stirring was continued for 30 mins at 0° C. and 1 mL of glacial acetic acid was added, immediately followed by 4 g of NaH₂PO₄.H₂O in 40 mL of water. The resultant mixture was extracted twice with 100 mL of dichloromethane each and the combined organic extracts were washed twice with 11.0 mL of phosphate buffer each, dried, and evaporated to dryness. The residue was dissolved in 60 mL of toluene, cooled to 0° C. and extracted with three 50 mL portions of cold phi 9.5 carbonate buffer. The aqueous extracts were adjusted to pH 3 with phosphoric acid, and extracted with five 40 mL portions of chloroform which were combined, dried and evaporated to dryness. The residue was purified by column chromatography using 25% ethylacetate/hexane to afford 1.9 g of b-ketoester (39%).

### [6-(3-Hydroxy-4-hydroxymethyl-pyrrolidin-1-yl)-6-oxo-hexyl]-carbamic acid 17-(1,5-dimethyl-hexyl)-10,13-dimethyl-2,3,4,7,8,9,10,11,12,13,14,15,16,17-tetradecahydro-1H-cyelopenta[a]phenanthren-3-yl ester AF

[chemical structure]

[0153] Methanol (2 mL) was added dropwise over a period of 1 h to a refluxing mixture of b-ketoester AE (1.5 g, 2.2 mmol) and sodium borohydride (0.226 g, 6 mmol) in tetrahydrofuran (10 mL). Stirring was continued at reflux temperature for 1 h. After cooling to room temperature, 1 N HCl (12.5 mL) was added, the mixture was extracted with ethylacetate (3×40 mL). The combined ethylacetate layer was dried over anhydrous sodium sulfate and concentrated under vacuum to yield the product which was purified by column chromatography (10% MeOH/CHCl₃) (89%).

### (6-{3-[Bis-(4-methoxy-phenyl)-phenyl-methoxymethyl]-4-hydroxy-pyrrolidin-1-yl}-6-oxy-hexyl)-carbamic acid 17-(1,5-dimethyl-hexyl)-10,13-dimethyl-2,3,4,7,8,9,10,11,12,13,14,15,16,17-tetradecahydro-1H-cyclopenta[a]phenanthren-3-yl ester AG

[chemical structure]

[0155] Diol AF (1.25 gm 1.994 mmol) was dried by evaporating with pyridine (2×5 mL) in vacuo. Anhydrous pyridine (10 mL) and 4,4′-dimethoxytritylchloride (0.724 g, 2.13 mmol) were added with stirring. The reaction was earned out at room temperature overnight. The reaction was quenched by the addition of methanol. The reaction mixture was concentrated under vacuum and to the residue dichloromethane (50 mL) was added. The organic layer was washed with 1M aqueous sodium bicarbonate. The organic layer was dried over anhydrous sodium sulfate, filtered and concentrated. The residual pyridine was removed by evaporating with toluene. The crude product was purified by column chromatography (2% MeOH/Chloroform, Rf=0.5 in 5% MeOH/CHCl₃) (1.75 g, 95%).

### Succinic acid mono-(4-[bis(4-methoxy-phenyl)-phenyl-methoxymethyl]-1-{6-[17-(1,5-dimethyl-hexyl)-10,13-dimethyl 2,3,4,7,8,9,10,11,12,13,14,15,16,17-tetradecahydro-1H cyclopenta[a]phenanthren-3-yloxycarbonylamino]-hexanoyl}-pyrrolidin-3-yl) ester AH

[chemical structure]

[0157] Compound AG (1.0 g, 1.05 mmol) was mixed with succinic anhydride (0.150 g, 1.5 mmol) and DMAP (0.073 g, 0.6 mmol) and dried in a vacuum at 40° C. overnight. The mixture was dissolved in anhydrous dichloroethane (3 mL), triethylamine (0.318 g, 0.440 mL, 3.15 mmol) was added and the solution was stirred at room temperature under argon atmosphere for 16 h. It was then diluted with dichloromethane (40 mL) and washed with ice cold aqueous citric acid (5 wt %, 30 mL) and water (2×20 mL). The organic phase was dried over anhydrous sodium sulfate and concentrated to dryness. The residue was used as such for the next step.

[0158] Cholesterol derivatised CPG AI

[chemical structure]

[0159] Succinate AH (0.254 g, 0.242 mmol) was dissolved in a mixture of dichloromethane/acetonitrile (3:2, 3 mL). To that solution DMA (0.0296 g, 0.242 mmol) in acetonitrile (1.25 mL), 2,2′-Dithio-bis(5-nitropyridine) (0.075 g, 0.242 mmol) in acetonitrile/dichloroethane. (3:1, 1.25 mL) were added successively. To the resulting solution triphenylphosphine (0.064 g, 0.242 mmol) in acetonitrile (0.6 ml) was added. The reaction mixture turned bright orange in color. The solution, was agitated briefly using a wrist-action shaker (5 mins). Long chain alkyl amine-CPG (LCAA-CPG) (1.5 g, 61 mM) was added. The suspension was agitated for 2 h. The CPG was filtered through a sintered funnel and washed with acetonitrile, dichloromethane and ether successively. Unreacted amino groups were masked using acetic anhydride/pyridine. The achieved loading of die CPG was measured by taking UV measurement (37 mM/g).

[0160] The synthesis of siRNAs bearing a 5′-12-dodecanoic acid bisdecylamide group (herein referred to as “5-C32-”) or a 5′-cholesteryl derivative group (herein referred to as “5′-Chol-”.) was performed as described in WO 2004/065601, except that, for the cholesteryl derivative, the oxidation step was performed using the Beaucage reagent in order to introduce a phosphorothioate linkage at the 5′-end of the nucleic acid oligomer.

[0161] Nucleic acid sequences are represented below using standard nomenclature, and specifically the abbreviations of Table 1-2.

TABLE 1-2
Abbreviations of nucleotide monomers used in nucleic acid
sequence representation. It will be understood that these
monomers, when present in an oligonucleotide, are mutually
linked by 5′-3′-phosphodiester bonds.

| Abbreviation^{a} | Nucleotide(s) |
|---|---|
| A, a | 2′-deoxy-adenosine-5′-phosphate, adenosine-5′- |
| | phosphate |
| C, c | 2′-deoxy-cytidine-5′-phosphate, cytidine-5′- |
| | phosphate |
| G, g | 2′-deoxy-guanosine-5′-phosphate, guanosine-5′- |
| | phosphate |
| T, t | 2′-deoxy-thymidine-5′-phosphate, thymidine-5′- |
| | phosphate |
| U, u | 2′-deoxy-uridine-5′-phosphate, uridine-5′- |
| | phosphate |
| N, n | any 2′-deoxy-nucleotide/nucleotide (G, A, C, or T, g, |
| | a, c or u) |
| Am | 2′-O-methyladenosine-5′-phosphate |
| Cm | 2′-O-methylcytidine-5′-phosphate |
| Gm | 2′-O-methylguanosine-5′-phosphate |
| Tm | 2′-O-methyl-thymidine-5′-phosphate |
| Um | 2′-O-methyluridine-5′-phosphate |
| Af | 2′-fluoro-2′-deoxy-adenosine-5′-phosphate |
| Cf | 2′-fluoro-2′-deoxy-cytidine-5′-phosphate |
| Gf | 2′-fluoro-2′-deoxy-guanosine-5′-phosphate |
| Tf | 2′-fluoro-2′-deoxy-thymidine-5′-phosphate |
| Uf | 2′-fluoro-2′-deoxy-uridine-5′-phosphate |
| A, C, G, T, U, a, | underlined: nucleoside-5′-phosphorothioate |
| c, g, t, u | |
| am, cm, gm, tm, | underlined: 2-O-methyl-nucleoside-5′-phosphorothioate |
| um | |

^{a}capital letters represeat 2′-deoxyribonucleotides (DNA), lower case letters represent ribonucleotides (RNA)

[0162] PCSK9 siRNA Screening in HuH7, HepG2, Hela and Primary Monkey Hepatocytes Discovers Highly Active Sequences

[0163] HuH-7 cells were obtained from JCRB Cell Bank (Japanese Collection of Research Bioresources) (Shinjuku, Japan, cat. No.: JCRB0403) Cells were cultured in Dulbecco's MEM (Biochrom AG, Berlin, Germany, eat. No. F0435) supplemented to contain 10% fetal calf serum (FCS) (Biochrom AG, Berlin, Germany, cat. No. 80115), Penicillin 100 U/ml, Streptomycin 100 μg/ml (Biochrom AG, Berlin, Germany, cat. No, A2213) and 2 mM L-Glutamin (Biochrom AG, Berlin, Germany, cat. No K0282) at 37° C. in an atmosphere with 5% CO₂ in a humidified incubator (Heraeus HERAcell, Kendro Laboratory Products, Langenselbold, Germany). HepG2 and Hela cells were obtained from American Type Culture Collection (Rockville, Md., cat. No, HB-8065) and cultured in MEM (Gibco Invitrogen, Karlsruhe, Germany, eat. No, 21090-022) supplemented to contain 10% fetal calf serum (FCS) (Biochrom AG, Berlin, Germany, cat. No. S0115), Penicillin 100 U/ml, Streptomycin 100 μg/ml (Biochrom AG, Berlin, Germany, cat. No. A2.213), 1× Non Essential Amino Acids (Biochrom AG, Berlin, Germany, cat. No. K-0293), and 1 mM Sodium Pyruvate (Biochrom AG, Berlin, Germany, cat. No. L-0473) at 37° C. in an atmosphere with 5% CO₂ in a humidified incubator (Heraeus HERAcell, Kendro Laboratory Products, Langenselbold, Germany).

[0164] For transfection with siRNA, HuH7, HepG2, or Hela cells were seeded at a density of 2.0×10⁴ cells/well in 96-well plates and transfected directly. Transfection of siRNA (30 nM for single dose screen) was carried out with lipofectamine 2000 (Invitrogen GmbH, Karlsruhe, Germany, cat. No. 11668-019) as described by the manufacturer.

[0165] 24 hours after transfection HuH7 and HepG2 cells were lysed and PCSK9 mRNA levels were quantified with the Quantigene Explore Kit (Genosprectra, Dumbarton Circle Fremont, USA, cat. No. QG-000-02) according to the protocol. PCSK9 mRNA levels were normalized to GAP-DH mRNA. For each siRNA eight individual datapoints were collected, siRNA duplexes unrelated to PCSK9 gene were used as control. The activity of a given. PCSK9 specific siRNA duplex was expressed as percent PCSK9 mRNA concentration in treated cells relative to PCSK9 mRNA concentration in cells treated with the control siRNA duplex.

[0166] Primary cynomolgus monkey hepatocytes (cryopreserved) were obtained from In vitro Technologies, Inc. (Baltimore, Md., USA, cat No M00305) and cultured in In VitroGRO CP Medium (cat No Z9.9029) at 37° C. in an atmosphere with 5% CO₂ in a humidified incubator.

[0167] For transfection with siRNA, primary cynomolgus monkey cells were seeded on Collagen coated plates (Fisher Scientific, cat. No. 08-774-5) at a density of 3.5×10⁴ cells/well in 96-well plates and transfected directly. Transfection of siRNA (eight 2-fold dilution series starting from 30 nM) in duplicates was carried out with lipofectamine 2000 (Invitrogen GmbH, Karlsruhe, Germany, cat. No. 11668-019) as described by the manufacturer.

[0168] 16 hours after transaction medium was changed to fresh In VitroGRO CP Medium with Torpedo Antibiotic Mix (In vitro Technologies, Inc, cat. No Z99000) added.

[0169] 24 hours alter medium change primary cynomolgus monkey cells were lysed and PCSK9 mRNA levels were quantified with the Quantigene Explore Kit (Genosprectra, Dumbarton Circle Fremont, USA, cat. No, QG-000-02) according to the protocol. PCSK9 mRNA levels were normalized to GAPDH mRNA. Normalized PCSK9/GAPDH ratios were then compared to PCSK9/GAPDH ratio of lipofectamine 2000 only control.

[0170] Tables 1-2 (and FIG. 6) summarize the results and provides examples of in vitro screens in different cell lines at different doses. Silencing of PCSK9 transcript was expressed as percentage of remaining transcript at a given dose. Highly active sequences are those with less than 70% transcript remaining post treatment with a given siRNA at a dose less than or equal to 100 nm. Very active sequences are those that have less than 60% of transcript remaining after treatment with a dose less than or equal to 100 nM. Active sequences are those that have less than 85% transcript remaining after treatment with a high dose (100 nM). Examples of active siRNA's were also screened in vivo in mouse in lipidoid formulations as described below. Active sequences in vitro were also generally active in vivo (See figure FIG. 6 example).

[0171] In vivo Efficacy Screen of PCSK9 siRNAs

[0172] Formulation Procedure

[0173] The lipidoid LNP-01-4HCl (MW 1487) (FIG. 1), Cholesterol (Sigma-Aldrich), and PEG-Ceramide C16 (Avanti Polar Lipids) were used to prepare lipid-siRNA nanoparticles. Stock solutions of each in ethanol were prepared; LNP-01,133 mg/mL; Cholesterol, 25 mg/mL, PEG-Ceramide C16,100 mg/mL. LNP-01, Cholesterol, and PEG-Ceramide C16 stock solutions were then combined in a 42:48:10 molar ratio. Combined lipid solution was mixed rapidly with aqueous siRNA (in sodium acetate pH 5) such that the final ethanol concentration was 35-45% and the final sodium acetate concentration was 100-300 mM. Lipid-siRNA nanoparticles formed spontaneously upon mixing. Depending on the desired particle size distribution, the resultant nanoparticle mixture was in some cases extruded through a polycarbonate membrane (100 nm cut-off) using a thermobarrel extruder (Lipex Extruder, Northern Lipids, Inc). In other cases, the extrusion step was omitted. Ethanol removal and simultaneous buffer exchange was accomplished by either dialysis or tangential flow filtration. Buffer was exchanged to phosphate buffered saline (PBS) pH 7.2.

[0174] Characterization of Formulations

[0175] Formulations prepared by either the standard or extrusion-free method are characterized in a similar manner Formulations are first characterized by visual inspection. They should be whitish translucent solutions free from aggregates or sediment. Particle size and particle size distribution of lipid-nanoparticles are measured by dynamic light scattering using a Malvern Zetasizer Nano ZS (Malvern, USA). Particles should be 20-300 nm, and ideally; 40-100 nm in size. The particle size distribution should be unimodal. The total siRNA concentration in the formulation, as well as the entrapped fraction, is estimated using a dye exclusion assay. A sample of the formulated siRNA is incubated with the RNA-binding dye Ribogreen (Molecular Probes) in the presence or absence of a formulation disrupting surfactant, 0.5% Triton-X100. The total siRNA in the formulation is determined by the signal from the sample containing the surfactant, relative to a standard curve. The entrapped traction is determined by subtracting the “free” siRNA content (as measured by the signal in the absence of surfactant) from the total siRNA content. Percent entrapped siRNA is typically >85%.

[0176] Bolus Dosing

[0177] Bolus dosing of formulated siRNAs in C57/BL6 mice (5/group, 8-10 weeks old, Charles River Laboratories, MA) was performed by tail vein injection using a 27G needle. SiRNAs were formulated in LNP-01 (and then dialyzed against PBS) at 0.5 mg/ml concentration allowing the delivery of the 5 mg/kg dose in 10 μl/g body weight. Mice were kept under an infrared lamp for approximately 3 min prior to dosing to ease injection.

[0178] 48 hour post dosing mice were sacrificed by CO₂ asphyxiation. 0.2 ml blood was collected by retro-orbital bleeding and the liver was harvested and frozen in liquid nitrogen. Serum and livers were stored at −80° C.

[0179] Frozen livers were grinded using 6850 Freezer/Mill Cryogenic Grinder (SPEX CentriPrep, Inc) and powders stored at −80° C. until analysis.

[0180] PCSK9 mRNA levels were detected using the branched-DNA technology based kit from QuantiGene Reagent System (Genospectra) according to the protocol. 10-20 mg of frozen liver powders was lysed in 600 ul of 0.16 ug/ml Proteinase K (Epicentre, #MPRK092) in Tissue and Cell Lysis Solution (Epicentre, #MTC096H) at 65° C. for 3 hours. Then 10 ul of the lysates were added to 90 ul of Lysis Working Reagent (1 volume of stock Lysis Mixture in two volumes of water) and incubated at 52° C. overnight on Genospectra capture plates with probe sets specific to mouse PCSK9 and mouse GAPDH or cyclophilin B. Nucleic acid sequences for Capture Extender (CE), Label Extender (LE) and blocking (BL) probes were selected from the nucleic-acid sequences of PCSK9, GAPDH and cyclophilin B with the help of the QuantiGene ProbeDesigner Software 2.0 (Genospectra, Fremont, Calif., USA, cat No. QG-Q002-G02). Chemo luminescence was read on a Victor2-Light (Perkin Elmer) as Relative light units. The ratio of PCSK9 mRNA to GAPDH or cyclophilin B mRNA in liver lysates was averaged over each treatment group and compared to a control group treated with PBS or a control group treated with an unrelated siRNA (blood coagulation factor VII).

[0181] Total serum cholesterol in mouse serum was measured using the StanBio Cholesterol LiquiColor kit (StanBio Laboratory, Boerne, Tex., USA) according to manufacturer's instructions. Measurements were taken on a Victor2 1420 Multilabel Counter (Perkin Elmer) at 495 nm.

### EXAMPLES

[0182] 32 PCSK9 siRNAs formulated in LNP-01 liposomes were tested in vivo in a mouse model. The experiment was performed at 5 mg/kg siRNA dose and at least 10 PCSK9 siRNAs showed more than 40% PCSK9 mRNA knock down compared to a control group treated with PBS, while control group treated with an unrelated siRNA (blood coagulation factor VII) had no effect (FIGS. 2-5). Silencing of PCSK9 transcript also coorelated with a lowering of cholesterol in these animals (FIGS. 4-5). In addition there was a strong coorelation between those molecules that were active in vitro and those active in vivo (FIG. 6). Sequences containing different chemical modifications were also screened in vitro (Tables 1 and 2) and in vivo. As an example, less modified sequences 9314 and 9318, and a more modified versions of that sequence 9314-(10792, 10793, and 10796); 9318-(10794, 10795, 10797) were tested both in vitro (In primary monkey hepatocytes) or in vivo (9314 and 10792) formulated in LNP-01. FIG. 7 (also see Tables 1 and 2) shows that the parent molecules 9314 and 9318 and the modified versions are all active in vitro. FIG. 8 as an example shows that both the parent 9314 and the more highly modified 10792 sequences are active in vivo displaying 50-60% silencing of endogenous PCSK9 in mice. FIG. 9 further exemplifies that activity of other chemically modified versions of the parents 9314 and 10792.

[0183] dsRNA Expression Vectors

[0184] In another aspect of the invention, PCSK9 specific dsRNA molecules that modulate PCSK9 gene expression activity are expressed from transcription units inserted into DNA or RNA vectors (see, e.g., Couture, A. et al., TIG. (1996), 12:5-10; Skillern, A., et al., International PCT Publication No. WO 00/22113, Conrad, International PCT Publication No. WO 00/22114, and Conrad, U.S. Pat. No. 6,054,299). These transgenes can be introduced as a linear construct a circular plasmid, or a viral vector, which can be incorporated and inherited as a transgene integrated into the host genome. The transgene can also be constructed to permit it to be inherited as an extrachromosomal plasmid (Gassmann, et al., Proc. Natl. Acad. Sci. USA (1995) 92:1292).

[0185] The individual strands of a dsRNA can be transcribed by promoters on two separate expression vectors and co-transfected into a target cell. Alternatively each individual strand of the dsRNA can be transcribed by promoters both of which are located on the same expression plasmid. In a preferred embodiment, a dsRNA is expressed as an inverted repeat joined by a linker polynucleotide sequence such that the dsRNA has a stem and loop structure.

[0186] The recombinant dsRNA expression vectors are generally DNA plasmids or viral vectors. dsRNA expressing viral vectors can be constructed based on, but not limited to, adeno-associated virus (for a review, see Muzyczka, et al., Curr. Topics Micro. Immunol. (1992) 158:97-129)); adenovirus (see, for example, Berkner, et al., BioTechniques (1998) 6:616), Rosenfeld et al. (1991, Science 252:431-434), and Rosenfeld et al. (1992), Cell 68:143-155)); or alphavirus as well as others blown in the art. Retroviruses have been used to introduce a variety of genes into many different cell types, including epithelial cells, in vitro and/or in vivo (see, e.g., Eglitis, et al., Science (1985) 230:1395-1398; Danes and Mulligan, Proc. Natl. Acad. Sci. USA (1998) 85:6460-6464; Wilson et al., 1988, Proc. Natl. Acad. Sci. USA 85:3014-3018; Armentano et al., 1990, Proc. Natl. Acad. Sci. USA. 87:61416145; Huber et al., 1991, Proc. Natl. Acad. Sci. USA 88:8039-8043; Ferry et al., 1991, Proc. Natl. Acad. Sci. USA 88:8377-8381; Chowdhury et al., 1991, Science 254:1802-1805; van Beuscechem, et al. 1992, Proc. Natl. Acad. Sci. USA 89:7640-19; Kay et al., 1992, Human Gene Therapy 3:641-647; Dai et al., 1992, Proc. Natl. Acad. Sci. USA 89:10892-10895; Hwu et al., 1993, J. Immunol. 150:4104-4115; U.S. Pat. No. 4,868,116; U.S. Pat. No. 4,980,286; PCT Application WO 89/07136; PCT Application. WO 89/02468; PCT Application WO 89/05345; and PCT Application WO 92/07573). Recombinant retroviral vectors capable of transducing and expressing genes inserted into the genome of a cell can be produced by transfecting the recombinant retroviral genome into suitable packaging cell lines such as PA317 and Psi-CRIP (Comette et al., 1991, Human Gene Therapy 2:5-10; Cone et al., 1984, Proc. Natl. Acad. Sci, USA 81:6349). Recombinant adenoviral vectors can be used to infect a wide variety of cells and tissues in susceptible hosts (e.g., rat, hamster, dog, and chimpanzee) (Hsu et al., 1992. J. Infectious Disease, 166:769), and also have the advantage of not requiring mitotically active cells for infection.

[0187] The promoter driving dsRNA expression in either a DNA plasmid or viral vector of the invention may be a eukaryotic RNA polymerase I (e.g. liposomal RNA promoter), RNA polymerase II (e.g. CMV early promoter or actin promoter or U6 snRNA promoter) or generally RNA polymerase III promoter (e.g. U6 snRNA or 7SK RNA promoter) or a prokaryotic promoter, for example the T7 promoter, provided the expression plasmid also encodes T7 RNA polymerase required for transcription from a T7 promoter. The promoter can also direct transgene expression, to the pancreas (see, e.g. the insulin regulatory sequence for pancreas (Bucchini et al., 1986, Proc. Natl. Acad. Sci. USA 83:2511-2515)).

[0188] In addition, expression of the transgene can be precisely regulated, for example, by using an inducible regulatory sequence and expression systems such as a regulatory sequence that is sensitive to certain physiological regulators, e.g., circulating glucose levels, or hormones (Docherty et al., 1994, FASEB J. 8:20-24). Such inducible expression systems, suitable for the control of transgene expression in cells or in mammals include regulation by ecdysone, by estrogen, progesterone, tetracycline, chemical, inducers of dimerization, and isopropyl-beta-D1-thiogalactopyranoside (EPTG). A person skilled in the art would be able to choose the appropriate regulatory/promoter sequence based on the intended use of the dsRNA transgene.

[0189] Generally, recombinant vectors capable of expressing dsRNA molecules are delivered as described below, and persist in target cells. Alternatively, viral vectors can be used that provide for transient expression of dsRNA molecules. Such vectors can be repeatedly administered as necessary. Once expressed, the dsRNAs bind to target RNA and modulate its function or expression. Delivery of dsRNA expressing vectors can be systemic, such as by intravenous or intramuscular administration, by administration to target cells ex-planted from the patient followed by reintroduction into the patient, or by any other means that allows for introduction into a desired target cell.

[0190] dsRNA expression DNA plasmids are typically transfected into target cells as a complex with cationic lipid carriers (e.g. Oligofectamine) or non-cationic lipid-based carriers (e.g. Transit-TKO™). Multiple lipid transfections for dsRNA-mediated knockdowns targeting different regions of a single PCSK9 gene or multiple PCSK9 genes over a period of a week or more are also contemplated by the invention. Successful introduction of the vectors of the invention into host cells can be monitored using various known methods. For example, transient transfection. can be signaled with, a reporter, such as a fluorescent marker, such as Green Fluorescent Protein (GFP). Stable transfection. of ex vivo cells can be ensured using markers that provide the transfected cell with resistance to specific environmental factors (e.g., antibiotics and drugs), such as hygromycin B resistance.

[0191] The PCSK9 specific dsRNA molecules can also be inserted into vectors and used as gene therapy vectors for human patients. Gene therapy vectors can be delivered to a subject by, for example, intravenous injection, local administration (see U.S. Pat. No. 5,328,470) or by stereotactic injection (see e.g., Chen et al. (1994) Proc. Natl. Acad. Sci. USA 91:3054-3057). The pharmaceutical preparation of the gene therapy vector can include the gene therapy vector in an acceptable diluent, or can comprise a slow release matrix in which the gene delivery vehicle is imbedded. Alternatively, where the complete gene delivery vector can be produced intact from recombinant cells, e.g., retroviral vectors, the pharmaceutical preparation can include one or more cells which produce the gene delivery system.

[0192] Those skilled in the art are familiar with methods and compositions in addition to those specifically set out in the instant disclosure which will allow them to practice this invention to the full scope of the claims hereinafter appended.

| | | | | |
|---|---|---|---|---|
| | | Mean percent re- | | |
| | | maining mRNA trans- | | |
| | | cript at siRNA | | |
| | | concentration/in | IC50 in | |
| position in | cell type | | | Cynomol- |

| human | | | | | | 100 | 30 | 3 | | IC50 | gous |
|---|---|---|---|---|---|---|---|---|---|---|---|
| access. # | | SEQ | | SEQ | | nM/ | nM/ | nM/ | 30 | in | monkey |
| NM_17493 | | ID | | ID | Duplex | HepG | HepG | HepG | nM/ | HepG | Hepatacyte |
| 6 | Sense strand sequence (5′-3′)¹ | NO: | Antisense-strand sequence (5′-3′)¹ | NO: | name | 2 | 2 | 2 | Hela | 2 [nM] | [nM]s |
| 2-20 | AGCGACGUCGAGGCGCUCATT | 1 | UGAGCGCCUCGACGCCGCUTT | 2 | AD- | | | | 35 | | |
| | | | | | 15220 | | | | | | |
| 15-33 | CGCUCAUGGUUGCAGGCGGTT | 3 | CCGCCUGCAACCAUGAGCGTT | 4 | AD- | | | | 56 | | |
| | | | | | 15275 | | | | | | |
| 16-34 | GCUCAUGGUUGCAGGCGGGTT | 5 | CCCGCCUGCAACCAUGAGCTT | 6 | AD- | | | | 70 | | |
| | | | | | 15301 | | | | | | |
| 30-48 | GCGGGCGCCGCCGUUCAGUTT | 7 | ACUGAACGGCGGCGCCCGCTT | 8 | AD- | | | | 42 | | |
| | | | | | 15276 | | | | | | |
| 31-49 | CGGGCGCCGCCGUUCAGUUTT | 9 | AACUGAACGGCGGCGCCCGTT | 10 | AD- | | | | 32 | | |
| | | | | | 15302 | | | | | | |
| 32-50 | GGGCGCCGCCGUUCAGUUCTT | 11 | GAACUGAACGGCGGCGCCCTT | 12 | AD- | | | | 37 | | |
| | | | | | 15303 | | | | | | |
| 40-58 | CCGUUCAGUUCAGGGUCUGTT | 13 | CAGACCCUGAACUGAACGGTT | 14 | AD- | | | | 30 | | |
| | | | | | 15221 | | | | | | |
| 43-61 | UUCAGUUCAGGGUCUGAGCTT | 15 | GCUCAGACCCUGAACUGAATT | 16 | AD- | | | | 61 | | |
| | | | | | 15413 | | | | | | |
| 82-100 | GUGAGACGGGCUCGGGCGGTT | 17 | CCGCCCGAGCCAGUCUCACTT | 18 | AD- | | | | 70 | | |
| | | | | | 15304 | | | | | | |
| 100-118 | GGCCGGGACGCGUCGUUGCTT | 19 | GCAACGACGCGUCCCGGCCTT | 20 | AD- | | | | 36 | | |
| | | | | | 15305 | | | | | | |
| 101-119 | GCCGGGACGCGUCGUUGCATT | 21 | UGCAACGACGCGUCCCGGCTT | 22 | AD- | | | | 20 | | |
| | | | | | 15306 | | | | | | |
| 102-120 | CCGGGACGCGUCGUUGCAGTT | 23 | CUGCAACGACGCGUCCCGGTT | 24 | AD- | | | | 38 | | |
| | | | | | 15307 | | | | | | |
| 105-123 | GGACGCGUCGUUGCAGCAGTT | 25 | CUGCUGCAACGACGCGUCCTT | 26 | AD- | | | | 50 | | |
| 135-153 | CCCCAGCCAGGAUUCCGCGTsT | 27 | CGCGGAAUCCUGGCUGGGATsT | 28 | AD- | 74 | 89 | | | | |
| | | | | | 9526 | | | | | | |
| 135-153 | ucctAGccAGGAuuccGcGTsT | 29 | CGCGGAAUCCUGGCUGGGATsT | 30 | AD- | | 97 | | | | |
| | | | | | 9652 | | | | | | |
| 136-154 | CCCAGCCAGGAUUCCGCGCTsT | 31 | GCGCGGAAUCCUGGCUGGGTsT | 32 | AD- | | 78 | | | | |
| | | | | | 9519 | | | | | | |
| 136-154 | cccAGccAGGAuuccGcGcTsT | 33 | GCGCGGAAUCCUGGCUGGGTsT | 34 | AD- | | 66 | | | | |
| | | | | | 9646 | | | | | | |
| 138-156 | CAGCCAGGAUUCCGCGCGCTsT | 35 | GCGCGCGGAAGCCUGGCUGTsT | 36 | AD- | | 55 | | | | |
| | | | | | 9523 | | | | | | |
| 138-156 | cAGccAGGAuuccGcGcGcTsT | 37 | GCGCGCGGAAUCCUGGCUGTsT | 38 | AD- | | 60 | | | | |
| | | | | | 9649 | | | | | | |
| 185-203 | AGCUCCUGCACAGUCCUCCTsT | 39 | GGAGGACUGUGCAGGAGCUTsT | 40 | AD- | | 112 | | | | |
| | | | | | 9569 | | | | | | |
| 185-203 | AGcuccaGcAcAGuccuccTsT | 41 | GGAGGACUGCGcAGGAGCUTsT | 42 | AD- | | 102 | | | | |
| | | | | | 9695 | | | | | | |
| 205-223 | CACCGCAAGGCUCAAGGCGTT | 43 | CGCCUUGAGCCUUGCGGUGTT | 44 | AD- | | | | 75 | | |
| | | | | | 15222 | | | | | | |
| 208-226 | CGCAAGGCUCAAGGCGCCGTT | 45 | CGGCGCCUUGAGCCUUGCGTT | 46 | AD- | | | | 78 | | |
| | | | | | 15278 | | | | | | |
| 210-228 | CAAGGCUCAAGGCGCCGCCTT | 47 | GGCGGCGCCUUGAGCCUUGTT | 48 | AD- | | | | 83 | | |
| | | | | | 15178 | | | | | | |
| 232-250 | GUGGACCGCGCACGGCCUCTT | 49 | GAGGCCGUGCGCGGUCCACTT | 50 | AD- | | | | 84 | | |
| | | | | | 15308 | | | | | | |
| 233-251 | UGGACCGCGCACGGCCGCGTT | 51 | AGAGGCCGUGCGCGGCCCATT | 52 | AD- | | | | 67 | | |
| | | | | | 15223 | | | | | | |
| 234-252 | GGACCGCGCACGGCCUCUATT | 53 | UAGAGGCCGUGCGCGGUCCTT | 54 | AD- | | | | 34 | | |
| | | | | | 15309 | | | | | | |
| 235-253 | GACCGCGCACGGCCUCUAGTT | 55 | CUAGAGGCCGUGCGCGGUCTT | 56 | AD- | | | | 44 | | |
| | | | | | 15279 | | | | | | |
| 236-254 | ACCGCGCACGGCCUCUAGGTT | 57 | CCUAGAGGCCGUGCGCGGUTT | 58 | AD- | | | | 63 | | |
| | | | | | 15194 | | | | | | |
| 237-255 | CCGCGCACGGCCUCUAGGUTT | 59 | ACCUAGAGGCCGUGCGCGGTT | 60 | AD- | | | | 42 | | |
| | | | | | 15310 | | | | | | |
| 238-256 | CGCGCACGGCCUCUAGGUCTT | 61 | GACCUAGAGGCCGUGCGCGTT | 62 | AD- | | | | 30 | | |
| | | | | | 35311 | | | | | | |
| 239-257 | GCGCACGGCCUCUAGGUCUTT | 63 | AGACCUAGAGGCCGUGCGCTT | 64 | AD- | | | | 18 | | |
| | | | | | 15392 | | | | | | |
| 240-258 | CGCACGGCCUCUAGGUCUCTT | 65 | GAGACCUAGAGGCCGUGCGTT | 66 | AD- | | | | 21 | | |
| | | | | | 15312 | | | | | | |
| 248-266 | CUCUAGGUCUCCUCGCCAGTT | 67 | CUGGCGAGGAGACCUAGAGTT | 68 | AD- | | | | 19 | | |
| | | | | | 15313 | | | | | | |
| 249-267 | UCUAGGUCUCCUCGCCAGGTT | 69 | CCUGGCGAGGAGACCUAGATT | 70 | AD- | | | | 81 | | |
| | | | | | 15280 | | | | | | |
| 250-268 | CUAGGUCUCCUCGCCAGGATT | 71 | GCCUGGCGAGGAGACCUAGTT | 72 | AD- | | | | 82 | | |
| | | | | | 15267 | | | | | | |
| 252-270 | AGGUCUCCUCGCCAGGACATT | 73 | GGUCCUGGCGAGGAGACCUTT | 74 | AD- | | | | 32 | | |
| | | | | | 15314 | | | | | | |
| 258-276 | CCUCGCCAGGACAGCAACCTT | 75 | GGUUGCUGUCCUGGCGAGGTT | 76 | AD- | | | | 74 | | |
| | | | | | 15315 | | | | | | |
| 300-318 | CGUCAGCUCCAGGCGGUCCTsT | 77 | GGACCGCCUGGAGCUGACGTsT | 78 | AD- | | 94 | | | | |
| | | | | | 9624 | | | | | | |
| 300-318 | cGucAGcuccAGGcGGuccTsT | 79 | GGACCGCCUGGAGCUGACGTsT | 80 | AD- | | 96 | | | | |
| | | | | | 9750 | | | | | | |
| 301-319 | GUCAGCUCCAGGCGGUCCUTsT | 81 | AGGACCGCCUGGAGCGGACTsT | 82 | AD- | 43 | 66 | | | | |
| | | | | | 9623 | | | | | | |
| 301-319 | GucAGcuccAGGcGGuccuTsT | 83 | AGGACCGCCUGGAGCUGACTsT | 84 | AD- | | 105 | | | | |
| | | | | | 9749 | | | | | | |
| 370-388 | GGCGCCCGUGCGCAGGAGGTT | 85 | CCUCCUGCGCACGGGCGCCTT | 86 | AD- | | | | 48 | | |
| | | | | | 15384 | | | | | | |
| 408-426 | GGAGCUGGUGCUAGCCUUGTsT | 87 | CAAGGCUAGCACCAGCUCCTsT | 88 | AD- | | 32 | 28 | | 0.20 | |
| | | | | | 9607 | | | | | | |
| 408-426 | GGAGcuGGuGcuAGccuuGTsT | 89 | cAAGGCuAGcACcAGCUCCTsT | 90 | AD- | | 78 | 73 | | | |
| | | | | | 9733 | | | | | | |
| 411-429 | GCUGGUGCUAGCCUUGCGUTsT | 91 | ACGCAAGGCUAGCACCAGCTsT | 92 | AD- | | 23 | 28 | | 0.07 | |
| | | | | | 9524 | | | | | | |
| 411-429 | GcuGGuGcuAGccuuGcGuTsT | 93 | ACGuAAGGCuAGcACcAGCTsT | 94 | AD- | | 91 | 90 | | | |
| | | | | | 9650 | | | | | | |
| 412-430 | CUGGUGCUAGCCUUGCGUUTsT | 95 | AACGCAAGGCUAGCACCAGTsT | 96 | AD- | | 23 | 32 | | | |
| | | | | | 9520 | | | | | | |
| 412-430 | CUGGUGCUAGCCUUGCGUUTsT | 97 | AACGCAAGGCUAGCACCAGTsT | 98 | AD- | | 23 | | | | |
| | | | | | 9520 | | | | | | |
| 412-430 | cuGGuGcuAGccuuGcGucTsT | 99 | AACGcAAGGCuAGcACcAGTsT | 100 | AD- | | 97 | 108 | | | |
| | | | | | 9646 | | | | | | |
| 416-434 | UGCCAGCCUUGCGUUCCGATsT | 101 | UCGGAACGCAAGGCUAGCATsT | 102 | AD- | | 37 | | | | |
| | | | | | 9608 | | | | | | |
| 416-434 | uGcuAGccuuGcGuuccGATsT | 103 | UCGGAACGcAAGGCuAGcATsT | 104 | AD- | | 91 | | | | |
| | | | | | 9734 | | | | | | |
| 419-437 | UAGCCUUGCGUUCCGAGGATsT | 105 | UCCUCGGAACGCAAGGCUATsT | 106 | AD- | | 32 | | | | |
| | | | | | 9546 | | | | | | |
| 419-437 | uAGccuuGcGuuccGAGGATsT | 107 | UCCUCGGAACGcAAGGCuATsT | 108 | AD- | | 57 | | | | |
| | | | | | 9672 | | | | | | |
| 439-457 | GACGGCCUGGCCGAAGCACTT | 109 | GUGCUUCGGCCAGGCCGUCTT | 110 | AD- | | | | 54 | | |
| | | | | | 15385 | | | | | | |
| 447-465 | GGCCGAAGCACCCGAGCACTT | 111 | GUGCUCGGGUGCUUCGGCCTT | 112 | AD- | | | | 31 | | |
| | | | | | 15393 | | | | | | |
| 448-466 | GCCGAAGCACCCGAGCACGTT | 113 | CGUGCUUGGGUGCUUCGGCTT | 114 | AD- | | | | 37 | | |
| | | | | | 15316 | | | | | | |
| 449-467 | CCGAAGCACCCGAGCACCGTT | 115 | CCGUGCUCGGGUGCUUCGGTT | 116 | AD- | | | | 37 | | |
| | | | | | 15317 | | | | | | |
| 458-476 | CCGAGCACGGAACCACAGCTT | 117 | GCUGUGGUUCCGUGCUCGGTT | 118 | AD- | | | | 63 | | |
| 484-502 | CACCGCUGCGCCAAGGAUCTT | 119 | GAUCCUUGGCGCAGCGGUGTT | 120 | AD- | | | | 45 | | |
| | | | | | 15195 | | | | | | |
| 486-504 | CCGCUGCGCCAAGGAUCCGTT | 121 | CGGAUCCUUGGCGCAGCGGTT | 122 | AD- | | | | 57 | | |
| | | | | | 15224 | | | | | | |
| 487-505 | CGCUGCGCCAAGGAUCCGUTT | 123 | ACGGAUCCUUGGCGCAGCGTT | 124 | AD- | | | | 42 | | |
| | | | | | 15188 | | | | | | |
| 489-507 | CUGCGCCAAGGAUCCGUGGTT | 125 | CCACGGAUCCUUGGCGCAGTT | 126 | AD- | | | | 51 | | |
| | | | | | 15225 | | | | | | |
| 500-518 | AUCCGUGGAGGUUGCCUGGTT | 127 | CCAGGCAACCUCCACGGAUTT | 128 | AD- | | | | 89 | | |
| | | | | | 15281 | | | | | | |
| 509-527 | GGUUGCCUGGCACCUACGUTT | 129 | ACGUAGGUGCCAGGCAACCTT | 130 | AD- | | | | 75 | | |
| | | | | | 15282 | | | | | | |
| 542-560 | AGGAGACCCACCUCUCGCATT | 131 | UGCGAGAGGUGGGUCUCCUTT | 132 | AD- | | | | 61 | | |
| | | | | | 15319 | | | | | | |
| 543-561 | GGAGACCCACCUCUGGCAGTT | 133 | CUGCGAGAGGUGGGUCUCCTT | 134 | AD- | | | | 56 | | |
| | | | | | 15226 | | | | | | |
| 544-562 | GAGACCCACCUCUCGCAGUTT | 135 | ACUGCGAGAGGUGGGUCUCTT | 136 | AD- | | | | 25 | | |
| | | | | | 15271 | | | | | | |
| 549-567 | CCACCUCUCGCAGUCAGAGTT | 137 | CUCUGACUGCGAGAGGUGGTT | 138 | AD- | | | | 25 | | |
| | | | | | 15283 | | | | | | |
| 552-570 | CCUCUCGCAGUCAGAGCGCTT | 139 | GCGCUCUGACUGCGAGAGGTT | 140 | AD- | | | | 64 | | |
| | | | | | 15284 | | | | | | |
| 553-571 | CUCUCGCAGUCAGAGCGCATT | 141 | UGCGCUCUGACUGCGAGAGTT | 142 | AD- | | | | 37 | | |
| | | | | | 15189 | | | | | | |
| 554-572 | UCUCGCAGUCAGAGCGCACTT | 143 | GUGCGCUCUGACUGCGAGATT | 144 | AD- | | | | 62 | | |
| | | | | | 15227 | | | | | | |
| 555-573 | CUCGCAGUCAGAGCGCACUTsT | 145 | AGUGCGCUCUGACUGCGAGTsT | 146 | AD- | | 31 | 29 | | 0.20 | |
| | | | | | 9547 | | | | | | |
| 555-573 | cucGcAGucAGAGcGcAcuTsT | 147 | AGUGCGCUCUGACUGCGAGTsT | 148 | AD- | | 56 | 57 | | | |
| | | | | | 9673 | | | | | | |
| 558-576 | GCAGUCAGAGCGCACUGCCTsT | 149 | GGCAGUGCGCUCUGACUGCTsT | 150 | AD- | | 54 | 60 | | | |
| | | | | | 9548 | | | | | | |
| 558-576 | GcAGucAGAGcGcAcuGccTsT | 151 | GGcAGUGCGCUCUGACUGCTsT | 152 | AD- | | 36 | 57 | | | |
| | | | | | 9674 | | | | | | |
| 606-624 | GGGAUACCUCACCAAGAUCTsT | 153 | GAUCUUGGUGAGGUAUCCCTsT | 154 | AD- | | 60 | | | | |
| | | | | | 9529 | | | | | | |
| 606-624 | GGGAuAccucAccAAGAucTsT | 155 | GAUCUUGGUGAGGuAUCCCTsT | 156 | AD- | | 140 | | | | |
| | | | | | 9655 | | | | | | |
| 659-677 | UGGUGAAGAUGAGUGGGGATsT | 157 | UCGCCACUCAUCUUCACCATsT | 158 | AD- | | 27 | 31 | | 0.27 | |
| | | | | | 9605 | | | | | | |
| 659-677 | uGGuGAAGAuGAGuGGcGATsT | 159 | UCGCcACUcAUCCUUACcATsT | 160 | AD- | | 31 | 31 | | 0.32 | |
| | | | | | 9731 | | | | | | |
| 663-681 | GAAGAUGAGUGGCGACCUGTsT | 161 | CAGGUCGCCACUCAUCUUCTsT | 162 | AD- | | 37 | | | | |
| | | | | | 9596 | | | | | | |
| 663-681 | GAAGAuGAGuGGcGAccuGTsT | 163 | cAGGUCGCcACUcAUCUUCTsT | 164 | AD- | | 76 | | | | |
| | | | | | 9722 | | | | | | |
| 704-722 | CCCAUGUCGACUACAUCGATsT | 165 | UCGAUGUAGUCGACAUGGGTsT | 166 | AD- | | 42 | | | | |
| | | | | | 9583 | | | | | | |
| 704-722 | cccAuGucGAcuAcAucGATsT | 167 | UCGAUGuAGUCGAcAUGGGTsT | 168 | AD- | | 104 | | | | |
| | | | | | 9709 | | | | | | |
| 718-736 | AUCGAGGAGGACUCCUCUGTsT | 169 | CAGAGGAGUCCUCCUCGAUTsT | 170 | AD- | | 113 | | | | |
| | | | | | 9579 | | | | | | |
| 718-736 | AucGAGGAGGAcuccucuGTsT | 171 | cAGAGGAGUCCUCCUCGAUTsT | 172 | AD- | | 81 | | | | |
| | | | | | 9705 | | | | | | |
| 758-776 | GGAACCUGGAGCGGAUUACTT | 173 | GUAAUCCGCUCCAGGUUCCTT | 174 | AD- | | | | 32 | | |
| | | | | | 15394 | | | | | | |
| 759-777 | GAACCUGGAGCGGAUUACCTT | 175 | GGUAAUCCGCUCCAGGUUCTT | 176 | AD- | | | | 72 | | |
| | | | | | 15196 | | | | | | |
| 760-778 | AACCUGGAGCGGAUUACCCTT | 177 | GGGUAAUCCGCUCCAGGUUTT | 178 | AD- | | | | 85 | | |
| | | | | | 15197 | | | | | | |
| 777-795 | CCCUCCACGGUACCGGGCGTT | 179 | CGCCCGGUACCGUGGAGGGTT | 180 | AD- | | | | 71 | | |
| | | | | | 15198 | | | | | | |
| 782-800 | CACGGUACCGGGCGGAUGATsT | 181 | UCAUCCGCCCGGUACCGUGTsT | 182 | AD- | 66 | 71 | | | | |
| | | | | | 9609 | | | | | | |
| 782-800 | cAcGGuAccGGGcGGAuGATsT | 183 | UcAUCCGCCCGGuACCGUGTsT | 184 | AD- | | 115 | | | | |
| | | | | | 9735 | | | | | | |
| 783-801 | ACGGUACCGGGCGGAUGAATsT | 185 | UUCAUCCGCCCGGUACCGUTsT | 186 | AD- | | 145 | | | | |
| | | | | | 9537 | | | | | | |
| 783-801 | AcGGuAccGGGcGGAuGAATsT | 187 | UUcAUCCGCCCGGuACCGUTsT | 188 | AD- | | 102 | | | | |
| | | | | | 9663 | | | | | | |
| 784-802 | CGGUACCGGGCGGAUGAAUTsT | 189 | AUUCAUCCGCCCGGUACCGTsT | 190 | AD- | | 113 | | | | |
| | | | | | 9528 | | | | | | |
| 784-802 | cGGuAccGGGcGGAuGAAuTsT | 191 | AUUcAUCCGCCCGGuACCGTsT | 192 | AD- | | 107 | | | | |
| | | | | | 9654 | | | | | | |
| 785-803 | GGUACCGGGCGGAUGAAUATsT | 193 | UAUUCAUCCGCCCGGUACCTsT | 194 | AD- | | 49 | | | | |
| | | | | | 9615 | | | | | | |
| 785-803 | GGuAccGGGcGGAuGAAcATsT | 195 | uAUUcAUCCGCCCGGuACCTsT | 196 | AD- | | 92 | | | | |
| | | | | | 9641 | | | | | | |
| 786-804 | GUACCGGGCGGAUGAAUACTsT | 197 | GUAUUCACCCGCCCGGUACTsT | 198 | AD- | | 57 | | | | |
| | | | | | 9514 | | | | | | |
| 786-804 | GuAccGGGcGGAuGAAuACTsT | 199 | GuAUUcAUCCGCCCGGuACTsT | 200 | AD- | | 89 | | | | |
| | | | | | 9640 | | | | | | |
| 788-806 | ACCGGGCGGAUGAAUACCATsT | 201 | UGGUAUUCAUCCGCCCGGUTsT | 202 | AD- | | 75 | | | | |
| | | | | | 9530 | | | | | | |
| 788-806 | AccGGGcGGAuGAAuAccATsT | 203 | UGGuAUUcAUCCGCCCGGUTsT | 204 | AD- | | 77 | | | | |
| | | | | | 9656 | | | | | | |
| 789-807 | CCGGGCGGAUGAAUACCAGTsT | 205 | CUGGUAUCCAUCCGCCCGGTsT | 206 | AD- | 79 | 80 | | | | |
| | | | | | 9538 | | | | | | |
| 789-807 | ccGGGcGGAuGAAuAccAGTsT | 207 | CUGGuAUUcAUCCGCCCGGTsT | 208 | AD- | | 53 | | | | |
| | | | | | 9664 | | | | | | |
| 825-843 | CCUGGUGGAGGUGUAUCUCTsT | 209 | GAGAUACACCUCCACCAGGTsT | 210 | AD- | 69 | 83 | | | | |
| | | | | | 9598 | | | | | | |
| 825-843 | ccuGGuGGAGGuGuAucucTsT | 211 | GAGAuAcACCUCcACcAGGTsT | 212 | AD- | | 127 | | | | |
| | | | | | 9724 | | | | | | |
| 826-844 | CUGGUGGAGGUGUAUCUCCTsT | 213 | GGAGAUACACCUCCACCAGTsT | 214 | AD- | 58 | 88 | | | | |
| | | | | | 9625 | | | | | | |
| 826-844 | cuGGuGGAGGuGuAucuccTsT | 215 | GGAGAuAcACCUGcACcAGTsT | 216 | AD- | | 60 | | | | |
| | | | | | 9751 | | | | | | |
| 827-845 | UGGUGGAGGUGUAUCUCCUTsT | 217 | AGGAGAUACACCUCCACCATsT | 218 | AD- | | 46 | | | | |
| | | | | | 9556 | | | | | | |
| 827-845 | uGGuGGAGGuGuAucuccuTsT | 219 | AGGAGAuAcACCUGcACcATsT | 220 | AD- | | 38 | | | | |
| | | | | | 9682 | | | | | | |
| 828-846 | GGUGGAGGUGUAUCUCCUATsT | 221 | UAGGAGAUACACCUCCACCTsT | 222 | AD- | 56 | 63 | | | | |
| | | | | | 9539 | | | | | | |
| 828-846 | GGuGGAGGuGuAucuccuATsT | 223 | uAGGAGAuAcACCUGcACCTsT | 224 | AD- | | 83 | | | | |
| | | | | | 9665 | | | | | | |
| 831-849 | GGAGGUGUAUCUCCUAGACTsT | 225 | GUCUAGGAGAUACACCUCCTsT | 226 | AD- | | 36 | | | | |
| | | | | | 9517 | | | | | | |
| 831-849 | GGAGGcGuAucuccuAGAcTsT | 227 | GUCuAGGAGAuAcACCUCCTsT | 228 | AD- | | 40 | | | | |
| | | | | | 9643 | | | | | | |
| 833-851 | AGGUGUAUCUCCUAGACACTsT | 229 | GUGUCUAGGAGAUACACCUTsT | 230 | AD- | | 36 | 34 | | 0.04 | |
| | | | | | 9610 | | | | | | |
| 833-851 | AGGuGuAucuccuAGAcAcTsT | 231 | GUGUCuAGGAGAuAcACCUTsT | 232 | AD- | | 22 | 29 | | 0.04 | |
| | | | | | 9736 | | | | | | |
| 833-851 | AfgGfuGfUAfuCfuCfcUfaGfaCfaCTTsT | 233 | p-gUfgUfcUfaGfgAfgAfaAfcAcCfaTsT | 234 | AD- | | | | 33 | | |
| | | | | | 14681 | | | | | | |
| 833-851 | AGGUfGUfAUfCfUfCfCfUfAGACfACfTsT | 235 | GGfGUfCfUfAGGAGAUfACfACfCfUfTsT | 236 | AD- | | | 27 | | | |
| | | | | | 14691 | | | | | | |
| 833-851 | AgGuGuAaCaCcUaGuCaCTsT | 237 | p-gUfgUfcUfaGfgAfgAfuAfcAfcCfuTsT | 238 | AD- | | | | 32 | | |
| | | | | | 14701 | | | | | | |
| 833-851 | AgGuGuAaCuCcUaGaCaCTsT | 239 | GUfGUfCfUfAGGAGAUfACfACfCfUfTsT | 240 | AD- | | | | 33 | | |
| | | | | | 14711 | | | | | | |
| 833-851 | AfgGfuGfuAfuCfuCfcUfaGfaCfaCfTsT | 241 | GUGUCuaGGagAUACAccuTsT | 242 | AD- | | | | 22 | | |
| | | | | | 14721 | | | | | | |
| 833-851 | AGGUfGUfAUfCfUfCfCfUfAGACfACfTsT | 243 | GUGUCuaGGagAUACAccuTsT | 244 | AD- | | | | 21 | | |
| | | | | | 14731 | | | | | | |
| 833-851 | AgGuGuAuCuCcUaGaCaCTsT | 245 | GUGUCuaGGagAUACAccuTsT | 246 | AD- | | | | 23 | | |
| | | | | | 14741 | | | | | | |
| 833-851 | GfcAfcCfcUfcAfuAfgGfcCfuGfgAfTsT | 247 | p-uCfcAfgGgcCfuAfcGfaGfgCfuGfcTsT | 248 | AD- | | | | 37 | | |
| | | | | | 15087 | | | | | | |
| 833-851 | GCfACfCfCfUfCfAUfAGGCfCfUfGGATsT | 249 | UfCfCfAGGCfCfUfAUfGAGGGUfGCfTsT | 250 | AD- | | | | 51 | | |
| | | | | | 15097 | | | | | | |
| 833-851 | GcAcCcUcAuAgGcCuGgATsT | 251 | p-aCfcAfgGfcCfuAfaGfaGfgGfaGfcTsT | 252 | AD- | | | | 26 | | |
| | | | | | 15107 | | | | | | |
| 833-851 | GcAcCcUcAuAgGcCuGgATsT | 253 | UfCfCfAGGCfCfUfAUfGAGGGUfGCfTsT | 254 | AD- | | | | 28 | | |
| | | | | | 15117 | | | | | | |
| 833-851 | GfcAfcCfcUfcAfuAfgGfcCfuGfgAfTsT | 255 | UCCAGgcCUauGAGGGugcTsT | 256 | AD- | | | | 33 | | |
| | | | | | 15127 | | | | | | |
| 833-851 | GCfACfCfCfuFCfAUfAGGCfCfUfGGATsT | 257 | UCCAGgcCUauGAGGGugcTsT | 258 | AD- | | | | 54 | | |
| | | | | | 15137 | | | | | | |
| 833-851 | GcAcCcUcAuAgGcCuGgATsT | 259 | UCCAGgcCUauGAGGGugcTsT | 260 | AD- | | | | 52 | | |
| | | | | | 15147 | | | | | | |
| 836-854 | UGUAUCUCCUAGACACCAGTsT | 261 | CUGGUGUCUAGGAGAUACATsT | 262 | AD- | | 94 | | | | |
| | | | | | 9516 | | | | | | |
| 836-854 | uGuAucuccuAGAcAccAGTsT | 263 | CUGGUGUCuAGGAGAuAcATsT | 264 | AD- | | 105 | | | | |
| | | | | | 9642 | | | | | | |
| 840-858 | UCUCCUAGACACCAGCAUATsT | 265 | UAUGCUGGUGUCUAGGAGATsT | 266 | AD- | | 46 | 51 | | | |
| | | | | | 9562 | | | | | | |
| 840-858 | ucuccuAGAcAccAGcAuATsT | 267 | uAUGCUGGUGGCuAGGAGATsT | 268 | AD- | | 26 | 34 | | 4.20 | |
| | | | | | 9688 | | | | | | |
| 840-858 | UfcUfcCfuAfgAfcAfcCfaGfcAfuAfTsT | 269 | p-uAfuGfcUfgGfuGfuCfuAfgGfaGfaTsT | 270 | AD- | | | | 38 | | |
| | | | | | 14677 | | | | | | |
| 840-858 | UfCfCfCfCfUfAGACfACfCfAGCfAUfATsT | 271 | UfAUfGCfUfGGUfGUfCfUfAGGAGATsT | 272 | AD- | | | | 52 | | |
| | | | | | 14687 | | | | | | |
| 840-858 | UcUcCuAgAcAcCaGcAuATsT | 273 | p-uAfuGfcUfgGfuGfuCfuAfgGfaGfaTsT | 274 | AD- | | | | 35 | | |
| | | | | | 14697 | | | | | | |
| 840-858 | UcUcCuAgAcAcCuGcAuATsT | 275 | UfAUfGCfUfGGUfGUfCfUfAGGAGATsT | 276 | AD- | | | | 58 | | |
| | | | | | 14707 | | | | | | |
| 840-858 | UfcUfcCfuAafAfcAfcCfaGfcAfuAfTsT | 277 | UAUGCugGUguCUAGGagaTsT | 278 | AD- | | | | 42 | | |
| | | | | | 14717 | | | | | | |
| 840-858 | UfCfCfCfCfUfAGACfACfCfAGCfAUfATsT | 279 | UAUGCugGUguCUAGGugaTsT | 280 | AD- | | | | 50 | | |
| | | | | | 14727 | | | | | | |
| 840-858 | UcGcCuAgAcAcCaGcAcATsT | 281 | UAGCGugGUguCUAGGagaTsT | 282 | AD- | | | | 32 | | |
| | | | | | 14737 | | | | | | |
| 840-858 | AfgGfcCfuGfgAfgUfuUfaUfuCfgGfTsT | 283 | p-cCfgAfaUfaAfaCfaCfcAfgGfcCfuTsT | 284 | AD- | | | | 16 | | |
| | | | | | 15083 | | | | | | |
| 840-858 | AGGCfCfUfGGAGUfUfCfAUfUfCfGGTsT | 285 | CfCfGAAUfAAACfGfCfCfAGGCfCfUfTsT | 286 | AD- | | | | 24 | | |
| | | | | | 15093 | | | | | | |
| 840-858 | AgGcCuGgAgUuUaUuCgGTsT | 287 | p-cCfgAfaUfaAfuCfuCfcAfgGfcCfuTsT | 288 | AD- | | | | 11 | | |
| | | | | | 15103 | | | | | | |
| 840-858 | AfgGfcCfuGfgAfgUfuUfaUfuCfgGfTsT | 289 | CfCfGAAUfAAACfUfCfCfAGGCfCfUfTsT | 290 | AD- | | | | 34 | | |
| | | | | | 15113 | | | | | | |
| 840-858 | AfgGgcCfuGfgAfgUfuUfaUfuCfgGfTsT | 291 | CCGAAuaAAcuCCAGGccuTsT | 292 | AD- | | | | 19 | | |
| | | | | | 15123 | | | | | | |
| 840-858 | AGGCfCfUfGGAGUfUfUfAUfUfCfGGTsT | 293 | CCGAAuaAAcuCCAGGccuTsT | 294 | AD- | | | | 15 | | |
| | | | | | 15133 | | | | | | |
| 840-858 | AgGcCuGgAgUcUaUcCgGTsT | 295 | CCGAAuaAAcuCCAGGccuTsT | 296 | AD- | | | | 16 | | |
| | | | | | 15143 | | | | | | |
| 841-859 | CUCCUAGACACCAGCAUACTsT | 297 | GUAUGCUGGUGUCUAGGAGTsT | 298 | AD- | | 50 | | | | |
| | | | | | 9521 | | | | | | |
| 841-859 | cuccuAGAcAccAGcAuAcTsT | 299 | GuAUGCUGGUGUCuAGGAGTsT | 300 | AD- | | 62 | | | | |
| | | | | | 9647 | | | | | | |
| 842-860 | UCCUAGACACCAGCAUACATsT | 301 | UGUAUGCUGGUGUCUAGGATsT | 302 | AD- | | 48 | | | | |
| | | | | | 9611 | | | | | | |
| 842-860 | uccuAGAcAccAGcAuAcATsT | 303 | UGcAUGCUGGUGUCuAGGATsT | 304 | AD- | | 68 | | | | |
| | | | | | 9737 | | | | | | |
| 843-861 | CCUAGACACCAGCAUACAGTsT | 305 | CUGUAUGCUGGUGUCUAGGTsT | 306 | AD- | 46 | 55 | | | | |
| | | | | | 9592 | | | | | | |
| 843-861 | ccUAGAcAccAGcAuAcAGTsT | 307 | CUGuAUGCUGGUGUCuAGGTsT | 308 | AD- | | 78 | | | | |
| | | | | | 9718 | | | | | | |
| 847-865 | GACACCAGCAUACAGAGUGTsT | 309 | CACUCUGUAUGCUGGUGUCTsT | 310 | AD- | | 64 | | | | |
| | | | | | 9561 | | | | | | |
| 847-865 | GAcAccAGcAuAcAGAGuGTsT | 311 | cACGCUGuAUGCUGGUGUCTsT | 312 | AD- | | 84 | | | | |
| | | | | | 9687 | | | | | | |
| 855-873 | CAUACAGAGUGACCACCGGTsT | 313 | CCGGUGGUCACUCUGUACGTsT | 314 | AD- | | 42 | 41 | | 2.10 | |
| | | | | | 9762 | | | | | | |
| 855-873 | cAuAcAGAGuGAccAccGGTsT | 315 | CCGGUGGUcACUCUGuAUGTsT | 316 | AD- | | 9 | 28 | | 0.40 | |
| | | | | | 9762 | | | | | | |
| 860-878 | AGAGUGACCACCGGGAAAUTsT | 317 | AUUUCCCGGUGGUCACUCUTsT | 318 | AD- | | 45 | | | | |
| | | | | | 9540 | | | | | | |
| 860-878 | AGAGuGAccAccGGGAAAUTsT | 319 | AUUUCCCGGUGGUcACUCUTsT | 320 | AD- | | 81 | | | | |
| | | | | | 9666 | | | | | | |
| 861-879 | GAGUGACCACCGGGAAAUCTsT | 321 | GAUUUCCCGGUGGUCACUCTsT | 322 | AD- | 48 | 73 | | | | |
| | | | | | 9535 | | | | | | |
| 861-879 | GAGuGAccAccGGGAAAccTsT | 323 | GAUUUCCCGGUGGUcACUCTsT | 324 | AD- | | 83 | | | | |
| | | | | | 9661 | | | | | | |
| 863-881 | GUGACCACCGGGAAAUCGATsT | 325 | UCGAUUUCCCGGUGGUCACTsT | 326 | AD- | | 35 | | | | |
| | | | | | 9559 | | | | | | |
| 863-881 | GuGAccAccGGGAAAucGATsT | 327 | UCGAUUUCCCGGUGGUcACTsT | 328 | AD- | | 77 | | | | |
| | | | | | 9685 | | | | | | |
| 865-883 | GACCACCGGGAAAUCGAGGTsT | 329 | CCUCGAUUUCCCGGUGGUCTsT | 330 | AD- | | 100 | | | | |
| | | | | | 9533 | | | | | | |
| 866-884 | ACCACCGGGAAAUCGAGGGTsT | 331 | CCUCGAUUUCCCGGUGGUCTsT | 332 | AD- | | 88 | | | | |
| | | | | | 9659 | | | | | | |
| 866-884 | ACCACCGGGAAAUCGAGGGTsT | 333 | CCCUCGAUUUCCCGGUGGUTsT | 334 | AD- | | 122 | | | | |
| | | | | | 9612 | | | | | | |
| 866-884 | AccAccGGGAAAucGAGGGTsT | 335 | CCCUCGAUUUCCCGGUGGUTsT | 336 | AD- | | 83 | | | | |
| | | | | | 9738 | | | | | | |
| 867-885 | CCACCGGGAAAUCGAGGGCTsT | 337 | GCCCUCGAUUUCCCGGUGGTsT | 338 | AD- | 75 | 96 | | | | |
| | | | | | 9557 | | | | | | |
| 867-885 | cCAccGGGAAAucGAGGGcTsT | 339 | GCCCUCGAUUUCCCGGUGGTsT | 340 | AD- | | 48 | | | | |
| | | | | | 9683 | | | | | | |
| 875-893 | AAAUCGAGGGCAGGGUCAUTsT | 341 | AUGACCCUGCCCUCGAUUUTsT | 342 | AD- | | 31 | 32 | | 0.53 | |
| | | | | | 9531 | | | | | | |
| 875-893 | AAAucGAGGGcAGGGucAuTsT | 343 | AUGACCCUGCCCUCGAUUUTsT | 344 | AD- | | 23 | 29 | | 0.66 | |
| | | | | | 9657 | | | | | | |
| 875-893 | AfaAfuCfgAfgGfgCfaGfggfcCfaUfTsT | 345 | p-aUfgAfcCfcUfgCfcCfuCfgAfuUfuTsT | 346 | AD- | | | | 81 | | |
| | | | | | 14673 | | | | | | |
| 875-893 | AAAUfCfGAGGGCfAGGGUfCfAUfTsT | 347 | AUfGACfCfCfUfGCfCfCfUfCfGAUfUfTs | 348 | AD- | | | | 56 | | |
| | | | T | | 14683 | | | | | | |
| 875-893 | AaAuCgAgGgCaGgGuCaUTsT | 349 | p-aUfgAfcCfcUfgCfcCfuCfGAfuUfuTsT | 350 | AD- | | | | 56 | | |
| | | | | | 14693 | | | | | | |
| 875-893 | AaAuCgAgGgCaGgGuCaUTsT | 351 | AUfGACfCfCfUfGCfCfCfUfGAUfUfUfTs | 352 | AD- | | | | 68 | | |
| | | | T | | 14703 | | | | | | |
| 875-893 | AfaAfuCfGAfgGfgCfaGfgGfcCfaUfTsT | 353 | AUGACccUCccCUCGAuuuTsT | 354 | AD- | | | | 55 | | |
| | | | | | 14713 | | | | | | |
| 875-893 | AAAUfCfGAGGGCfAGGGUfCfAUfTsT | 355 | AUGACccUGccCUCGAuuuTsT | 356 | AD- | | | | 24 | | |
| | | | | | 14723 | | | | | | |
| 87-893 | AuAuCgAggGcaGgGuCaUTsT | 357 | AUGACccUGccCUCGAuuuTsT | 358 | AD- | | | | 34 | | |
| | | | | | 14733 | | | | | | |
| 85-893 | CfgGgcAfcCfcUfCAfuAfGGfCCfuGfTsT | 359 | p-cAfgGgcCfuAfuGfaGfgGfuGfcCfgTsT | 360 | AD- | | | | 85 | | |
| | | | | | 15079 | | | | | | |
| 875-893 | CfGGCfACfCfCfUfCfAUfAGGCfCfUfGTsT | 361 | CfAGGCfCfUfAUfGAGGGfGCfCfGTsT | 362 | AD- | | | | 54 | | |
| | | | | | 15089 | | | | | | |
| 875-893 | CgGcAcCcUcAuAgGcCuGTsT | 363 | p-cAfgGfcCfuAfuGfaGfgGfuGfcCfgTsT | 364 | AD- | | | | 70 | | |
| | | | | | 15099 | | | | | | |
| 875-893 | GcGcAcCcUcAuAgGcCcGTsT | 365 | CfAGGCfCfUfAUfGAGGGUfGCfCfGTsT | 366 | AD- | | | | 67 | | |
| | | | | | 15109 | | | | | | |
| 875-893 | CfgGgcAfcCfcUfcAfuAfgGgcCfuGfTsT | 367 | CAGGCcuAUgaGGGUGccgTsT | 368 | AD- | | | | 67 | | |
| | | | | | 15119 | | | | | | |
| 875-893 | CfGGCfACfCfCfUfCfAUfAGGCfCfUfGTsT | 369 | CAGGCcuAUgaGGGUGccgTsT | 370 | AD- | | | | 57 | | |
| | | | | | 15129 | | | | | | |
| 875-893 | CgGcAcCcUcAuAgGcCuGTsT | 371 | CAGGCcuAGgaGGGUGccgTsT | 372 | AD- | | | | 69 | | |
| | | | | | 15139 | | | | | | |
| 877-895 | AUCGAGGGCAGGGUCAUGGTsT | 373 | CCAUGACCCUGCCCUCGAUTsT | 374 | AD- | | 160 | | | | |
| | | | | | 9542 | | | | | | |
| 877-895 | AucGAGGGcAGGGucAuGGTsT | 375 | CcAUGACCCUGCCCUCGAUTsT | 376 | AD- | | 92 | | | | |
| | | | | | 9668 | | | | | | |
| 878-896 | cGAGGGcAGGGucAuGGucTsT | 377 | GACcAUGACCCUGCCCUCGTsT | 378 | AD- | | 109 | | | | |
| | | | | | 9739 | | | | | | |
| 880-898 | GAGGGCAGGGUCAUGGUCATsT | 379 | UGACCAUGACCCUGCCCUCTsT | 380 | AD- | 56 | 83 | | | | |
| | | | | | 9637 | | | | | | |
| 880-898 | GAGGGcAGGGucAuGGucATsT | 381 | UGACcAUGACCCUGCCCUCTsT | 382 | AD- | | 79 | | | | |
| | | | | | 9763 | | | | | | |
| 882-900 | GGGCAGGGUCAUGGUCACCTsT | 383 | GGUGACCAUGACCCUGCCCTsT | 384 | AD- | | 82 | | | | |
| | | | | | 9630 | | | | | | |
| 882-900 | GGGcAGGGucAuGGucAccTsT | 385 | GGUGACcAUGACCCUGCCCTsT | 386 | AD- | | 63 | | | | |
| | | | | | 9756 | | | | | | |
| 885-903 | CAGGGUCAUGGUCACCGACTsT | 387 | GUCGGUGACCAUGACCCUGTsT | 388 | AD- | | 55 | | | | |
| | | | | | 9593 | | | | | | |
| 885-903 | cAGGGucAcGGucAccGAcTsT | 389 | GUCGGUGACcAUGACCCUGTsT | 390 | AD- | | 115 | | | | |
| | | | | | 9719 | | | | | | |
| 886-904 | AGGGUCAUGGUCACCGACUTsT | 391 | AGUCGGUGACCAUGACCCUTsT | 392 | AD- | | 111 | | | | |
| | | | | | 9601 | | | | | | |
| 886-904 | AGGGucAuGGucAccGAcuTsT | 393 | AGUCGGUGACcAUGACCCUTsT | 394 | AD- | | 118 | | | | |
| | | | | | 9727 | | | | | | |
| 892-910 | AUGGUCACCGACUUCGAGATsT | 395 | UCUCGAAGUCGGUGACCAUTsT | 396 | AD- | | 36 | 42 | | 1.60 | |
| | | | | | 9573 | | | | | | |
| 892-910 | AuGGucAccGAcuucGAGATsT | 397 | UCUCGAAGUCGGUGACcAUTsT | 398 | AD- | | 32 | 36 | | 2.50 | |
| | | | | | 9699 | | | | | | |
| 899-917 | CCGACUUCGAGAAUGUGCCTT | 399 | GGCACAUUCUCGAAGUCGGTT | 400 | AD- | | | | 26 | | |
| | | | | | 15228 | | | | | | |
| 921-939 | GGAGGACGGGACCCGCUUCTT | 401 | GAAGCGGGUCCCGUCCUCCTT | 402 | AD- | | | | 53 | | |
| | | | | | 15395 | | | | | | |
| 993-1011 | CAGCGGCCGGGAUGCCGGTsT | 403 | GCCGGCAUCCCGGCCGCUGTsT | 404 | AD- | | 126 | | | | |
| | | | | | 9602 | | | | | | |
| 993-1011 | cAGcGGccGGGAuGccGGcTsT | 405 | GCCGGcAUCCCGGCCGCUGTsT | 406 | AD- | | 94 | | | | |
| | | | | | 9728 | | | | | | |
| 1020-1038 | GGGUGCCAGCAUGCGCAGCTT | 407 | GCUGCGCAUGCUGGCACCCTT | 408 | AD- | | | | 45 | | |
| | | | | | 15386 | | | | | | |
| 1038-1056 | CCUGCGCGUGCUCAACUGCTsT | 409 | GCAGUUGAGCACGCGCAGGTsT | 410 | AD- | | 112 | | | | |
| | | | | | 9580 | | | | | | |
| 1038-1058 | UGCGCGUGCUCAACUGCCATsT | 411 | GcAGUUGAGcACGCGcAGGTsT | 412 | AD- | | 86 | | | | |
| | | | | | 9706 | | | | | | |
| 1040-1058 | UGCGCGUGCUCAACUGCCATsT | 413 | UGGCAGUUGAGCACGCGCATsT | 414 | AD- | | 35 | | | | |
| | | | | | 9581 | | | | | | |
| 1040-1058 | uGcGcGuGcucAAcuGccATsT | 415 | UGGcAGUUGAGcACGCGcATsT | 416 | AD- | | 81 | | | | |
| | | | | | 9707 | | | | | | |
| 1042-1060 | CGCGUGCUCAACUGCCAAGTsT | 417 | CUUGGCAGUUGAGCACGCGTsT | 418 | AD- | | 51 | | | | |
| | | | | | 9543 | | | | | | |
| 1042-1060 | cGcGuGcucAAcuGccAAGTsT | 419 | CUUGGcAGUUGAGcACGCGTsT | 420 | AD- | | 97 | | | | |
| | | | | | 9669 | | | | | | |
| 1053-1071 | CUGCCAAGGGAAGGGCACGTsT | 421 | CGUGCCCUUCCCUUGGCAGTsT | 422 | AD- | | 74 | | | | |
| | | | | | 9574 | | | | | | |
| 1053-1071 | cuGccAAGGGAAGGGcAcGTsT | 423 | CGUGCCCUUCCCUUGGcAGTsT | 424 | AD- | | | | | | |
| | | | | | 9700 | | | | | | |
| 1057-1075 | CAAGGGAAGGGCACGGUUATT | 425 | UAACCGUGCCCUUCCCUUGTT | 426 | AD- | | | | 26 | | |
| | | | | | 15320 | | | | | | |
| 1058-1076 | AAGGGAAGGGCACGGUUAGTT | 427 | CUAACCGUGCCCUUCCCUUTT | 428 | AD- | | | | 34 | | |
| | | | | | 15321 | | | | | | |
| 1059-1077 | AGGGAAGGGCACGGUUAGCTT | 429 | GCUAACCGUGCCCUUCCCUTT | 430 | AD- | | | | 64 | | |
| | | | | | 15199 | | | | | | |
| 1060-1078 | GGGAAGGGCACGGUUAGCGTT | 431 | CGCUAACCGUGCCCUUCCCTT | 432 | AD- | | | | 86 | | |
| | | | | | 15167 | | | | | | |
| 1061-1079 | GGAAGGGCACGGUUAGCGGTT | 433 | CCGCUAACCGUGCCCUUCCTT | 434 | AD- | | | | 41 | | |
| | | | | | 15164 | | | | | | |
| 1062-1080 | GAAGGGCACGGUUAGCGGCTT | 435 | GCCGCUAACCGUGCCCUUCTT | 436 | AD- | | | | 43 | | |
| | | | | | 15166 | | | | | | |
| 1063-1081 | AAGGGCACGGUUAGCGGCATT | 437 | UGCCGCUAACCGUGCCCUUTT | 438 | AD- | | | | 64 | | |
| | | | | | 15322 | | | | | | |
| 1064-1082 | AGGGCACGGUUAGCGGCACTT | 439 | GCGCCGCUAACCGUGCCCUTT | 440 | AD- | | | | 46 | | |
| | | | | | 15200 | | | | | | |
| 1068-1086 | CACGGUUAGCGGCACCCUCTT | 441 | GAGGGUGCCGCUAACCGUGTT | 442 | AD- | | | | 27 | | |
| | | | | | 15213 | | | | | | |
| 1069-1087 | ACGGUUAGCGGCACCCUCATT | 443 | UGAGGGUGCCGCUAACCGUTT | 444 | AD- | | | | 44 | | |
| | | | | | 15229 | | | | | | |
| 1072-1090 | GUUAGCGGCACCCUCAUAGTT | 445 | CUAUGAGGGUGCCGCUAACTT | 446 | AD- | | | | 49 | | |
| | | | | | 15215 | | | | | | |
| 1073-1091 | UUAGCGGCACCCUCAUAGGTT | 447 | CCUAUGAGGGUGCCGCUAATT | 448 | AD- | | | | 101 | | |
| | | | | | 15214 | | | | | | |
| 1076-1094 | GCGGCACCCUCAUAGGCCUTsT | 449 | AGGCCUAUGAGGGUGCCGCTsT | 450 | AD- | | 15 | 32 | | 0.98 | |
| | | | | | 9315 | | | | | | |
| 1079-1097 | GCACCCUCAUAGGCCUGGATsT | 451 | UCCAGGCCUAUGAGGGUGCTsT | 452 | AD- | | 35 | 51 | | | |
| | | | | | 9326 | | | | | | |
| 1085-1103 | UCAUAGGCCUGGAGUUUAUTsT | 453 | AUAAACUCCAGGCCUAUGATsT | 454 | AD- | | 14 | 37 | | 0.40 | |
| | | | | | 9318 | | | | | | |
| 1090-1108 | GGCCUGGAGUUUAUUCGGATsT | 455 | UCCGAAUAAACUCCAGGCCTsT | 456 | AD- | | 14 | 33 | | | |
| | | | | | 9323 | | | | | | |
| 1091-1109 | GCCUGGAGUUUAUUCGGAATsT | 457 | UUCCGAAUAAACUCCAGGCTsT | 458 | AD- | | 11 | 22 | | 0.04 | |
| | | | | | 9314 | | | | | | |
| 1091-1109 | GccuGGAGuuuAuccGGAATsT | 459 | UUCCGAAuAAACUCcAGGCTsT | 460 | AD- | | | | | 0.10 | 0.30 |
| | | | | | 10792 | | | | | | |
| 1091-1109 | GccuGGAGuuuAuucGGAATsT | 461 | UUCCGAAUAACUCCAGGCTsT | 462 | AD- | | | | | 0.1 | 0.1 |
| | | | | | 10796 | | | | | | |
| 1093-1111 | CUGGAGUUUAUUCGGAAAATsT | 463 | UUUUCCGAAUAAACUCCAGTsT | 464 | AD- | | 101 | | | | |
| | | | | | 9638 | | | | | | |
| 1093-1111 | cuGGAGuuuAuucGGAAAATsT | 465 | UUUUCCGAAuAACUCcAGTsT | 466 | AD- | | 112 | | | | |
| | | | | | 9764 | | | | | | |
| 1095-1113 | GGAGUUUAUUCGGAAAAGCTsT | 467 | GCUUUUCCGAAUAAACUCCTsT | 468 | AD- | | 53 | | | | |
| | | | | | 9525 | | | | | | |
| 1095-1113 | GGAGuuuAuucGGAAAAGcTsT | 469 | GCUUUUCCGAAuAAACUCCTsT | 470 | AD- | | 58 | | | | |
| | | | | | 9651 | | | | | | |
| 1096-1114 | GAGUUUAUUCGGAAAAGCCTsT | 471 | GGCUUUUCCGAAUAAACUCTsT | 472 | AD- | | 97 | | | | |
| | | | | | 9560 | | | | | | |
| 1096-1114 | GACuuuAuccGGAAAAGcCTsT | 473 | GGCUUUUCCGAAuAAACUCTsT | 474 | AD- | | 111 | | | | |
| | | | | | 9686 | | | | | | |
| 1100-1118 | UUAUUCGGAAAAGCCAGCUTsT | 475 | AGCUGGCUUUUCCGAAUAATsT | 476 | AD- | | 157 | | | | |
| | | | | | 9536 | | | | | | |
| 1100-1118 | uuAuucGGAAAAGccAGcuTsT | 477 | AGCUGGCUUUUCCGAAuAATsT | 478 | AD- | | 81 | | | | |
| | | | | | 9662 | | | | | | |
| 1154-1172 | CCCUGGCGGGUGGGUACAGTsT | 479 | CUGUACCCACCCGCCAGGGTsT | 480 | AD- | 52 | 68 | | | | |
| | | | | | 9584 | | | | | | |
| 1154-1172 | cccuGGcGGGuGGGuAcAGTsT | 481 | CUGcACCcACCCGCcAGGGTsT | 482 | AD- | | 111 | | | | |
| | | | | | 9710 | | | | | | |
| 1155-1173 | CCUGGCGGGUGGGUACAGCTT | 483 | GCUGUACCCACCCGCCAGGTT | 484 | AD- | | | | 62 | | |
| | | | | | 15323 | | | | | | |
| 1157-1175 | UGGCGGGUGGGUACAGCCGTsT | 485 | CGGCUGUACCCACCCGCCATsT | 486 | AD- | | 91 | | | | |
| | | | | | 9551 | | | | | | |
| 1157-1175 | uGGcGGGuGGGuAcAGccGTsT | 487 | CGGCUGuACCcACCCGCcATsT | 488 | AD- | | 62 | | | | |
| | | | | | 9677 | | | | | | |
| 1158-1176 | GGCGGGUGGGUACAGCCGCTT | 489 | GCGGCUGUACCCACCCGCCTT | 490 | AD- | | | | 52 | | |
| | | | | | 15230 | | | | | | |
| 1162-1180 | GGUGGGUACAGCCGCGUCCTT | 491 | GGACGCGGCUGUACCCACCTT | 492 | AD- | | | | 25 | | |
| | | | | | 15231 | | | | | | |
| 1164-1182 | UGGGUACAGCCGCGUCCUCTT | 493 | GAGGACGCGGCUGUACCCATT | 494 | AD- | | | | 36 | | |
| | | | | | 15285 | | | | | | |
| 1172-1190 | GCCGCGUCCUCAACGCCGCTT | 495 | GCGGCGUUGAGGACGCGGCTT | 496 | AD- | | | | 27 | | |
| | | | | | 15396 | | | | | | |
| 1173-1191 | CCGCGUCCUCAACGCCGCCTT | 497 | GGCGGCGUUGAGGACGCGGTT | 498 | AD- | | | | 36 | | |
| | | | | | 15397 | | | | | | |
| 1216-1234 | GUCGUGCUGGUCACCGCUGTsT | 499 | CAGCGGUGACCAGCACGACTsT | 500 | AD- | | 112 | | | | |
| | | | | | 9600 | | | | | | |
| 1216-1234 | GucGuGcuGGucAccGcuGTsT | 501 | cAGCGGUGACcAGcACGACTsT | 502 | AD- | | 95 | | | | |
| | | | | | 9726 | | | | | | |
| 1217-1235 | UCGUGCUGGUCACCGCUGCTsT | 503 | GCAGCGGUGACCAGCACGATsT | 504 | AD- | | 107 | | | | |
| | | | | | 9606 | | | | | | |
| 1217-1235 | ucGuGcuGGucAccGcuGcTsT | 505 | GcAGCGGUGACcAGcACGATsT | 506 | AD- | | 105 | | | | |
| | | | | | 9732 | | | | | | |
| 1223-1241 | UGGUCACCGCUGCCGGCAATsT | 507 | UUGCCGGCAGCGGUGACCATsT | 508 | AD- | 56 | 75 | | | | |
| | | | | | 9633 | | | | | | |
| 1223-1241 | uGGucAccGcuGccGGcAATsT | 509 | UUGCCGGcAGCGGUGACcATsT | 510 | AD- | | 111 | | | | |
| | | | | | 9759 | | | | | | |
| 1224-1242 | GGUCACCGCUGCCGGCAACTsT | 511 | GUUGCCGGCAGCGGUGACCTsT | 512 | AD- | | 66 | | | | |
| | | | | | 9588 | | | | | | |
| 1224-1242 | GGucAccGcuGccGGcAAcTsT | 513 | GUUGCCGGcAGCGGUGACCTsT | 514 | AD- | | 106 | | | | |
| | | | | | 9714 | | | | | | |
| 1227-1245 | CACCGCUGCCGGCAACUUCTsT | 515 | GAAGUUGCCGGCAGCGGUGTsT | 516 | AD- | 67 | 85 | | | | |
| | | | | | 9589 | | | | | | |
| 1227-1245 | cAccGuuGccGGcAAcuucTsT | 517 | GAAGUUGCCGGcAGCGGUGTsT | 518 | AD- | | 113 | | | | |
| | | | | | 9715 | | | | | | |
| 1229-1247 | CCGCUGCCGGCAACUUCCGTsT | 519 | CGGAAGUUGCCGGCAGCGGTsT | 520 | AD- | | 120 | | | | |
| | | | | | 9575 | | | | | | |
| 1229-1247 | cCGcuGccGGcAAcuuccGTsT | 521 | CGGAAGUUGCCGGcAGCGGTsT | 522 | AD- | | 100 | | | | |
| | | | | | 9701 | | | | | | |
| 1230-1248 | CGCUGCCGGCAACUUCCGGTsT | 523 | CCGGAAGUUGCCGGCAGCGTsT | 524 | AD- | | 103 | | | | |
| | | | | | 9563 | | | | | | |
| 1230-1248 | cGcuGccGGcAAuuuccGGTsT | 525 | CCGGAAGUUGCCGGcAGCGTsT | 526 | AD- | | 81 | | | | |
| | | | | | 9689 | | | | | | |
| 1231-1249 | GCUGCCGGCAACUUCCGGGTsT | 527 | CCCGGAAGUUGCCGGCAGCTsT | 528 | AD- | 80 | 95 | | | | |
| | | | | | 9594 | | | | | | |
| 1231-1249 | GcuGccGGcAAcuuccGGGTsT | 529 | CCCGGAAGUGGCCGGcAGCTsT | 530 | AD- | | 92 | | | | |
| | | | | | 9720 | | | | | | |
| 1236-1254 | CGGCAACUUCCGGGACGAUTsT | 531 | AUCGUCCCGGAAGUUGCCGTsT | 532 | AD- | | 83 | | | | |
| | | | | | 9585 | | | | | | |
| 1236-1254 | cGGcAAcuuccGGGAcGAuTsT | 533 | AUCGUCCCGGAAGUUGCCGTsT | 534 | AD- | | 122 | | | | |
| | | | | | 9711 | | | | | | |
| 1237-1255 | GGCAACUUCCGGGACGAUGTsT | 535 | CAUCGUCCCGGAAGUUGCCTsT | 536 | AD- | | 100 | | | | |
| | | | | | 9614 | | | | | | |
| 1237-1255 | GGcAAcuuccGGGAcGAuGTsT | 537 | cAUCGUCCCGGAAGUUGCCTsT | 538 | AD- | | 198 | | | | |
| | | | | | 9740 | | | | | | |
| 1243-1261 | UUCCGGGACGAUGCCUGCCTsT | 539 | GGCAGGCAUGGUCCCGGAATsT | 540 | AD- | | 116 | | | | |
| | | | | | 9615 | | | | | | |
| 1243-1261 | uuccGGGAcGAuGccuGcCTsT | 541 | GGcAGGcAUCGUCCCGGAATsT | 542 | AD- | | 130 | | | | |
| | | | | | 9741 | | | | | | |
| 1248-1266 | GGACGAUGCCUGCCUCUACTsT | 543 | GUAGAGGCAGGCAUCGUCCTsT | 544 | AD- | 32 | 30 | | | | |
| | | | | | 9534 | | | | | | |
| 1248-1266 | GGACGAUGCCUGCCUCUACTsT | 545 | GUAGAGGCAGGCAUCGUCCTsT | 546 | AD- | | 32 | | | | |
| | | | | | 9534 | | | | | | |
| 1248-1266 | GGAcGAuGccuGccucuAcTsT | 547 | GuAGAGGcAGGcAUCGUCCTsT | 548 | AD- | | 89 | 79 | | | |
| | | | | | 9660 | | | | | | |
| 1279-1297 | GCUCCCGAGGUCAUCACAGTT | 549 | CUGUGAUGACCUCGGGAGCTT | 550 | AD- | | | | 46 | | |
| | | | | | 15324 | | | | | | |
| 1280-1298 | CUCCCGAGGUCAUCACAGUTT | 551 | ACUGUGAUGACCUCGGGAGTT | 552 | AD- | | | | 19 | | |
| | | | | | 15232 | | | | | | |
| 1281-1299 | UCCCGAGGUCAUCACAGUUTT | 553 | AACUGUGAUGACCUCGGGATT | 554 | AD- | | | | 25 | | |
| | | | | | 15233 | | | | | | |
| 1314-1332 | CCAAGACCAGCCGGUGACCTT | 555 | GGUCACCGGCUGGUCUUGGTT | 556 | AD- | | | | 59 | | |
| | | | | | 15234 | | | | | | |
| 1315-1333 | CAAGACCAGCCGGUGACCCTT | 557 | GGGUCACCGGCUGGUCUUGTT | 558 | AD- | | | | 109 | | |
| | | | | | 15286 | | | | | | |
| 1348-1366 | ACCAACUUUGGCCGCUGUGTsT | 559 | CACAGCGGCCAAAGUUGGUTsT | 560 | AD- | | 122 | | | | |
| | | | | | 9590 | | | | | | |
| 1348-1366 | AccAAcuuuGGccGcuGuGTsT | 561 | cAcAGCGGCcAAAGUUGGUTsT | 562 | AD- | | 114 | | | | |
| | | | | | 9716 | | | | | | |
| 1350-1368 | CAACUUUGGCCGCUGUGUGTsT | 563 | CACACAGCGGCCAAAGUUGTsT | 564 | AD- | | 34 | | | | |
| | | | | | 9632 | | | | | | |
| 1350-1368 | cAAcuuuGGccGcuGuGuGTsT | 565 | cAcAcAGCGGCcAAAGUUGTsT | 566 | AD- | | 96 | | | | |
| | | | | | 9758 | | | | | | |
| 1360-1378 | CGCUGUGUGGACCUCUUUGTsT | 567 | CAAAGAGGUCCACACAGCGTsT | 568 | AD- | | 41 | | | | |
| | | | | | 9567 | | | | | | |
| 1360-1378 | cGcuGuGuGGAccucuuuGTsT | 569 | cAAAGAGGUCcAcAcAGCGTsT | 570 | AD- | | 50 | | | | |
| | | | | | 9693 | | | | | | |
| 1390-1408 | GACAUCAUUGGUGCCUCCATsT | 571 | UGGAGGCACCAAUGAUGUCTsT | 572 | AD- | 81 | 104 | | | | |
| | | | | | 9586 | | | | | | |
| 1390-1408 | GAcAucAuuGGuGccuccATsT | 573 | UGGAGGcACcAAUGAUGUCTsT | 574 | AD- | | 107 | | | | |
| | | | | | 9712 | | | | | | |
| 1394-1412 | UCAUUGGUGCCUCCAGCGATsT | 575 | UCGCUGGAGGCACCAAUGATsT | 576 | AD- | | 120 | | | | |
| | | | | | 9564 | | | | | | |
| 1394-1412 | ucAuuGGuGccuccAGcGATsT | 577 | UCGCUGGAGGcACcAAUGATsT | 578 | AD- | | 92 | | | | |
| | | | | | 9690 | | | | | | |
| 1417-1435 | AGCACCUGCUUUGUGUCACTsT | 579 | GUGACACAAAGCAGGUGCUTsT | 580 | AD- | 74 | 84 | | | | |
| | | | | | 9616 | | | | | | |
| 1417-1435 | AGcAccuGcuuuGcGucAcTsT | 581 | GUGAcAcAAAGcAGGUGCUTsT | 582 | AD- | | 127 | | | | |
| | | | | | 9742 | | | | | | |
| 1433-1451 | CACAGAGUGGGACAUCACATT | 583 | UGUGAUGUCCCACUCUGUGTT | 584 | AD- | | | | 24 | | |
| | | | | | 15398 | | | | | | |
| 1486-1504 | AUGCUGUCUGCCGAGCCGGTsT | 585 | CCGGCUCGGCAGACAGCAUTsT | 586 | AD- | | 111 | | | | |
| | | | | | 9617 | | | | | | |
| 1486-1504 | AuGcuGucuGccGAGccGGTsT | 587 | CCGGCUCGGcAGAcAGcAUTsT | 588 | AD- | | 104 | | | | |
| | | | | | 9743 | | | | | | |
| 1491-1509 | GUCUGCCGAGCCGGAGCUCTsT | 589 | GAGCUCCGGCUCGGCAGACTsT | 590 | AD- | 73 | 90 | | | | |
| | | | | | 9635 | | | | | | |
| 1491-1509 | GucuGccGAGccGGAGcucTsT | 591 | GAGCUCCGGCUCGGcAGACTsT | 592 | AD- | | 83 | | | | |
| | | | | | 9761 | | | | | | |
| 1521-1539 | GUUGAGGCAGAGACUGAUCTsT | 593 | GAUCAGUCUCUGCCUCAACTsT | 594 | AD- | | 76 | | | | |
| | | | | | 9568 | | | | | | |
| 1521-1539 | GuuGAGGcAGAGAcuGAucTsT | 595 | GAUcAGUCUCUGCCUcAACTsT | 596 | AD- | | 52 | | | | |
| | | | | | 9694 | | | | | | |
| 1527-1545 | GCAGAGACUGAUCCACUUCTsT | 597 | GAAGUGGAUCAGUCUCUGCTsT | 598 | AD- | | 47 | | | | |
| | | | | | 9576 | | | | | | |
| 1527-1545 | GcAGAGAcuGAuucAcuucTsT | 599 | GAAGUGGAUcAGUCUCUGCTsT | 600 | AD- | | 79 | | | | |
| | | | | | 9702 | | | | | | |
| 1529-1547 | AGAGACUGAUCCACUUCUCTsT | 601 | GAGAAGUGGAUCAGUCUCGTsT | 602 | AD- | | 69 | | | | |
| | | | | | 9627 | | | | | | |
| 1529-1547 | AGAGAcuGAuccAcuucucTsT | 603 | GAGAAGUGGAUcAGUCUCUTsT | 604 | AD- | | 127 | | | | |
| | | | | | 9753 | | | | | | |
| 1543-1561 | UUCUCUGCCAAAGAUGUCATsT | 605 | UGACAUCUUUGGCAGAGAATsT | 606 | AD- | | 141 | | | | |
| | | | | | 9628 | | | | | | |
| 1543-1561 | uucucuGccAAAGAuGucATsT | 607 | UGAcAUCUUUGGcAGAGAATsT | 608 | AD- | | 89 | | | | |
| | | | | | 9754 | | | | | | |
| 1545-1563 | CUCUGCCAAAGAUGUCAUCTsT | 609 | GAUGACAUCUUUGGCAGAGTsT | 610 | AD- | | 80 | | | | |
| | | | | | 9631 | | | | | | |
| 1545-1563 | cucuGccAAAGAuGucAucTsT | 611 | GAUGAcAUCUUUGGcAGAGTsT | 612 | AD- | | 78 | | | | |
| | | | | | 9757 | | | | | | |
| 1580-1598 | CUGAGGACCAGCGGGUACUTsT | 613 | AGUACCCGCUGGUCCUCAGTsT | 614 | AD- | | 31 | 32 | | | |
| | | | | | 9595 | | | | | | |
| 1580-1598 | cuGAGGAccAGcGGGuAcuTsT | 615 | AGuACCCGCUGGUCCUcAGTsT | 616 | AD- | | 87 | 70 | | | |
| | | | | | 9721 | | | | | | |
| 1581-1599 | UGAGGACCAGCGGGUACUGTsT | 617 | CAGUACCCGCUGGUCCUCATsT | 618 | AD- | | 68 | | | | |
| | | | | | 9544 | | | | | | |
| 1581-1599 | uGAGGAccAGcGGGuAcUGTsT | 619 | cAGuACCCGCUGGGCCUcATsT | 620 | AD- | | 67 | | | | |
| | | | | | 9670 | | | | | | |
| 1666-1684 | ACUGUAUGGUCAGCACACUTT | 621 | AGUGUGCUGACCAUACAGUTT | 622 | AD- | | | | 25 | | |
| | | | | | 15235 | | | | | | |
| 1668-1686 | UGUAGGGUCAGCACACUCGTT | 623 | CGAGUGUGCCGACCAUACATT | 624 | AD- | | | | 73 | | |
| | | | | | 15236 | | | | | | |
| 1669-1687 | GUAUGGUCAGCACACUCGGTT | 625 | CCGAGUGUGCUGACCAUACTT | 626 | AD- | | | | 100 | | |
| | | | | | 15168 | | | | | | |
| 1697-1715 | GGAUGGCCACAGCCGUCGCTT | 627 | GCGACGGCUGUGGCCAUCCTT | 628 | AD- | | | | 92 | | |
| | | | | | 15174 | | | | | | |
| 1698-1716 | GAUGGCCACAGCCGUCGCCTT | 629 | GGCGACGGCUGUGGCCAUCTT | 630 | AD- | | | | 81 | | |
| | | | | | 15235 | | | | | | |
| 1806-1824 | CAAGCUGGUCUGCCGGGCCTT | 631 | GGCCCGGCAGACCAGCUUGTT | 632 | AD- | | | | 65 | | |
| | | | | | 15326 | | | | | | |
| 1815-1833 | CUGCCGGGCCCACAACGCUTsT | 633 | AGCGUGUGGGCCCGGCAGTsT | 634 | AD- | 35 | 42 | | | | |
| | | | | | 9570 | | | | | | |
| 1815-1833 | cuGccGGGcccAcAAcGcuTsT | 635 | AGCGUUGUGGGCCCGGcAGTsT | 636 | AD- | | 77 | | | | |
| | | | | | 9696 | | | | | | |
| 1816-1834 | UGCCGGGCCCACAACGCUUTsT | 637 | AAGCGUUGUGGGCCCGGCATsT | 638 | AD- | | 38 | | | | |
| | | | | | 9566 | | | | | | |
| 1816-1834 | uGccGGGcccAcAAcGcuuTsT | 639 | AAGCGUUGUGGGCCCGGcATsT | 640 | AD- | | 78 | | | | |
| | | | | | 9692 | | | | | | |
| 1818-1836 | CCGGGCCCACAACGCUUUUTsT | 641 | AAAAGCGUUGUGGGCCCGGTsT | 642 | AD- | | 100 | | | | |
| | | | | | 9532 | | | | | | |
| 1818-1836 | ccGGGcccAcAAcGccuuuTsT | 643 | AAAAGCGUUGUGGGCCCGGTsT | 644 | AD- | | 102 | | | | |
| | | | | | 9658 | | | | | | |
| 1820-1838 | GCGGCCCACAACGCUUUUGTsT | 645 | CCAAAAGCGUUGUGGGCCCTsT | 646 | AD- | | 50 | | | | |
| | | | | | 9549 | | | | | | |
| 1820-1838 | GGGcccAcAAcGcuuuuGGTsT | 647 | CcAAAAGCGUUGUGGGCCCTsT | 648 | AD- | | 78 | | | | |
| | | | | | 9675 | | | | | | |
| 1840-1858 | GGUGAGGGUGUCUACGCCATsT | 649 | UGGCGUAGACACCCUCACCTsT | 650 | AD- | | 43 | | | | |
| | | | | | 9541 | | | | | | |
| 1840-1858 | GGuGAGGGuGucuAcGccATsT | 651 | UGGCGuAGAcACCCUcACCTsT | 652 | AD- | | 73 | | | | |
| | | | | | 9667 | | | | | | |
| 1843-1861 | GAGGGUGUCUACGCCAUUGTsT | 653 | CAAUGGCGUAGACACCCUCTsT | 654 | AD- | | 36 | | | | |
| | | | | | 9550 | | | | | | |
| 1843-1861 | GAGGGuGucuAcGccAuuGTsT | 655 | cAAUGGCGuAGAcACCCUCTsT | 656 | AD- | | 100 | | | | |
| | | | | | 9676 | | | | | | |
| 1861-1879 | GCCAGGUGCUGCCUGCUACTsT | 657 | GUAGCAGGCAGCACCUGGCTsT | 658 | AD- | | 27 | 32 | | | |
| | | | | | 9571 | | | | | | |
| 1861-1879 | GccAGGuGcuGccUGcuAcTsT | 659 | GuAGcAGGcAGcACCUGGCTsT | 660 | AD- | | 74 | 89 | | | |
| | | | | | 9697 | | | | | | |
| 1862-1880 | CCAGGUGCUGCCUGCUACCTsT | 661 | GGUAGCAGGCAGCACCUGGTsT | 662 | AD- | 47 | 53 | | | | |
| | | | | | 9572 | | | | | | |
| 1862-1880 | ccAGGuGcuGccuGcuAccTsT | 663 | GGuAGcAGGcAGcACCUGGTsT | 664 | AD- | | 73 | | | | |
| | | | | | 9698 | | | | | | |
| 2008-2026 | ACCCACAAGCCGCCUGUGCTT | 665 | GCACAGGCGGCUUGUGGGUTT | 666 | AD- | | | | 82 | | |
| | | | | | 15327 | | | | | | |
| 2023-2041 | GUGCUGAGGCCACGAGGUCTsT | 667 | GACCUCGUGGCCUCAGCACTsT | 668 | AD- | | 30 | 35 | | | |
| | | | | | 9639 | | | | | | |
| 2023-2041 | GuGcuGAGGccAcGAGGucTsT | 669 | GACCUCGUGGCCUcAGcACTsT | 670 | AD- | | 82 | 74 | | | |
| | | | | | 9765 | | | | | | |
| 2024-2042 | UGCUGAGGCCACGAGGUCATsT | 671 | UGACCUCGUGGCCUCAGCATsT | 672 | AD- | | 31 | 35 | | 0.60 | |
| | | | | | 9518 | | | | | | |
| 2024-2042 | UGCUGAGGCCACGAGGUCATsT | 673 | UGACCUCGUGGCCUCAGCATsT | 674 | AD- | | 31 | | | | |
| | | | | | 9518 | | | | | | |
| 2024-2042 | uGcuGAGGccAcGAGGucATsT | 675 | uGACCUCGUGGCCUcAGcATsT | 676 | AD- | | 35 | 37 | | 2.60 | |
| | | | | | 9644 | | | | | | |
| 2024-2042 | UfgCfuGfaGfgCfcAfcGfaGfgUfCAfTsT | 677 | p-aGfaCfcUfcGfuGfgCfcUfcAfgCfaTsT | 678 | AD- | | | | 26 | | |
| | | | | | 14672 | | | | | | |
| 2024-2042 | UfGCfUfGAGGCfCfACfGAGGUfCfATsT | 679 | UfGACfCfUfCfGCfGGCfCfUfCfAGCfATsT | 680 | AD- | | | | 27 | | |
| | | | | | 15682 | | | | | | |
| 2024-2042 | UgCuGaGgCcAcGaGgUcATsT | 681 | p-uGfuCfcUfcGfuGfgCfcUfcAfgCfaTsT | 682 | AD- | | | | 22 | | |
| | | | | | 14692 | | | | | | |
| 2024-2042 | UgCuGaGgCcAcGuGgUcATsT | 683 | GfGACfCfUfCfGUfGGCfCfUfCfAGCfATsT | 684 | AD- | | | | 19 | | |
| | | | | | 14702 | | | | | | |
| 2024-2042 | UfgCfuGfaGfgCfcAfcGfaGfgUfcAfTsT | 685 | UGACCucGUggCCUCAgcaTsT | 686 | AD- | | | | 25 | | |
| | | | | | 14712 | | | | | | |
| 2024-2042 | UfGCfUfGAGGCfCfACfGAGGUfCfATsT | 687 | UGACCucGUggCCUCAgcaTsT | 688 | AD- | | | | 18 | | |
| | | | | | 14722 | | | | | | |
| 2024-2042 | UgCuGaGgCcAcGuGgUcATsT | 689 | UGACCucGUggCCUCAgcaTsT | 690 | AD- | | | | 32 | | |
| | | | | | 14732 | | | | | | |
| 2024-2042 | GfuGfgUfcAfgCfgGfcCfgGfgAfuGfTsT | 691 | p-cAfuCfcCfgGgcCfgCfcGfaCfcAfcTsT | 692 | AD- | | | | 86 | | |
| | | | | | 15078 | | | | | | |
| 2024-2042 | GUfGGUfCfAGCfGGCfCfGGGAUfGTsT | 693 | CfAUfCfCfCfGGCfCfGCfUfGACfGTACfTsT | 694 | AD- | | | | 97 | | |
| | | | | | 15088 | | | | | | |
| 2024-2042 | GuGgUcAgCgGcCgGgAuGTsT | 695 | p-cAfuCfcCfGGfcCfgCfuGfaCfcAfcTsT | 696 | AD- | | | | 74 | | |
| | | | | | 15098 | | | | | | |
| 2024-2042 | GuGgUcAgCgGcCgGgAuGTsT | 697 | CfAUfCfCfCfGGCfCfGCfUfGACfCfACfTsT | 698 | AD- | | | | 67 | | |
| | | | | | 15108 | | | | | | |
| 2024-2042 | GfuGfgUfCAfgCfgGfcCfgGfgAfuGfTsT | 699 | CAUCCcgGCcgCUGACcacTsT | 700 | AD- | | | | 76 | | |
| | | | | | 15118 | | | | | | |
| 2024-2042 | GUfGGUfCfAGCfGGCfCfGGGAUfGTsT | 701 | CAUCCcgGCcgCUGACcacTsT | 702 | AD- | | | | 86 | | |
| | | | | | 15128 | | | | | | |
| 2024-2042 | GuGgUcAgCgGcCgGgAuGTsT | 703 | CAUCCcgGCcgCUGACcacTsT | 704 | AD- | | | | 74 | | |
| | | | | | 15138 | | | | | | |
| 2030-2048 | GGCCACGAGGUCAGCCCAATT | 705 | UCGGGCUGACCUCGUGGCCTT | 706 | AD- | | | | 30 | | |
| | | | | | 15237 | | | | | | |
| 2035-2053 | CGAGGUCAGCCCAACCAGUTT | 707 | ACUGGUUGGGCUGACCUCGTT | 708 | AD- | | | | 30 | | |
| | | | | | 15287 | | | | | | |
| 2039-2057 | GUCAGCCCAACCAGUGCGUTT | 709 | ACGCACUGGUUGGGCUGACTT | 710 | AD- | | | | 36 | | |
| | | | | | 15238 | | | | | | |
| 2041-2059 | CAGCCCAACCAGUGCGUGGTT | 711 | CCACGCACUGGUUGGGCUGTT | 712 | AD- | | | | 35 | | |
| | | | | | 15238 | | | | | | |
| 2062-2080 | CACAGGGAGGCCAGCAUCCTT | 713 | GGAUGCUGGCCUCCCUGUGTT | 714 | AD- | | | | 47 | | |
| | | | | | 15399 | | | | | | |
| 2072-2090 | CCAGCAUCCACGCUUCCUGTsT | 715 | CAGGAAGCGUGGAUGCUGGTsT | 716 | AD- | | 37 | | | | |
| | | | | | 9582 | | | | | | |
| 2072-2090 | cCAGcAuccAcGcucccuGTsT | 717 | cAGGAAGCGGGGAUGCGGGTsT | 718 | AD- | | 81 | | | | |
| | | | | | 9708 | | | | | | |
| 2118-2136 | AGUCAAGGAGCAUGGAAUCTsT | 719 | GAUUCCAUGCUCCUUGACUTsT | 720 | AD- | | 31 | 43 | | | |
| | | | | | 9545 | | | | | | |
| 2118-2136 | AGucAAGGAGcAuGGAAccTsT | 721 | GAUUCcAUGCUCCUUGACUTsT | 722 | AD- | | 15 | 33 | | 2.50 | |
| | | | | | 9671 | | | | | | |
| 2118-2136 | AfgUfcAfaGfgAfgCfaUfgGfaAfuCfTsT | 723 | p-gAfuUfcCfuUfgCfaCfcUfuGfaCfuTsT | 724 | AD- | | | | 16 | | |
| | | | | | 14674 | | | | | | |
| 2118-2136 | AGUfCfAAGGAGCfAUfGGAAUfCfTsT | 725 | GAUfUfCfCfAUfGCfUfCfCfUfGfGACfUfTs | 726 | AD- | | | | 26 | | |
| | | | T | | 14684 | | | | | | |
| 2118-2136 | AgUcAaGgAgCaUgGaAcCTsT | 727 | p-gAfuGfcCfaUfgCfuCfcUfuGfuCfuTsT | 728 | AD- | | | | 18 | | |
| | | | | | 14694 | | | | | | |
| 2118-2136 | AgUcAaGgAgCaUgGuAuCTsT | 729 | GAUfUfCfCfAUfGCfUfCfCfUfUfGACfUFTs | 730 | AD- | | | | 27 | | |
| | | | T | | 14704 | | | | | | |
| 2118-2136 | AfgUfcAfuGfgAfgCfaUfgGgaAfcCfTsT | 731 | GAUUCcaUGcuCCUUGacuTsT | 732 | AD- | | | | 20 | | |
| | | | | | 14714 | | | | | | |
| 2118-2136 | AGUfCfAAGGAGCfAUfGGAAUfCTTsT | 733 | GAUUCcaUGcuCCUUGucuTsT | 734 | AD- | | | | 18 | | |
| | | | | | 14724 | | | | | | |
| 2118-2136 | AgUcAaGgAgCaUgGaAuCTsT | 735 | GAUUCcaUGcuCCUUGucuTsT | 736 | AD- | | | | 18 | | |
| | | | | | 14734 | | | | | | |
| 2118-2136 | GfcGfgCfuCfcCfuCfaUfaGfgCfcUfTsT | 737 | p-aGfgCfcUfaUfgAfgGfgUfgCfcGfcTsT | 738 | AD- | | | | 29 | | |
| | | | | | 15080 | | | | | | |
| 2118-2136 | GCfGGCfACfCfCfUfCfAUfAGGCfCfUfTsT | 739 | AGGCfCfUfAUfGAGGGUfGCfCfGCfTsT | 740 | AD- | | | | 23 | | |
| | | | | | 15090 | | | | | | |
| 2118-2136 | GcGgCaCcCuCaUaGgCcUTsT | 741 | p-aGfgCfcUfaUfgAfgGfgUfgCfcGfcTsT | 742 | AD- | | | | 26 | | |
| | | | | | 15100 | | | | | | |
| 2118-2316 | GcGgCaCcCuCaUaGgCcUTsT | 743 | AGGCfCfGfAUfGAGGGUfGCfCfCCfTsT | 744 | AD- | | | | 23 | | |
| | | | | | 15110 | | | | | | |
| 2118-2136 | GfcGfgCfaCfcCfuCfaUfaGfgCfcUfTsT | 745 | AGGCCuaUGagGGUGCcgcTsT | 746 | AD- | | | | 20 | | |
| | | | | | 15120 | | | | | | |
| 2118-2136 | GCfGGCfACfCfCfUfCfAUfAGGCfCfUfTsT | 747 | AGGCCuuUGugGGUGCcgcTsT | 748 | AD- | | | | 20 | | |
| | | | | | 15130 | | | | | | |
| 2118-2136 | GcGgCaCcCuCaUaGgCcUTsT | 749 | AGGCCuaUGagGGUGCcgcTsT | 750 | AD- | | | | 19 | | |
| | | | | | 15140 | | | | | | |
| 2122-2140 | AAGGAGCAUGGAAUCCCGGTsT | 751 | CCGGGAUUCCAUGCUCCUUTsT | 752 | AD- | | 59 | | | | |
| | | | | | 9522 | | | | | | |
| 2122-2140 | AAGGAGcAuGGAAucccGGTsT | 753 | CCGGGAUUCcAUGCUCCUUTsT | 754 | AD- | | 78 | | | | |
| | | | | | 9648 | | | | | | |
| 2123-2141 | AGGAGCAUGGAAUCCCGGCTsT | 755 | GCCGGGAUUCCAUGCUCCUTsT | 756 | AD- | | 80 | | | | |
| | | | | | 9552 | | | | | | |
| 2123-2141 | AGGAGcAuGGAAucccGGcTsT | 757 | GCCGGGAUUCcAUGCUCCUTsT | 758 | AD- | | 76 | | | | |
| | | | | | 9678 | | | | | | |
| 2125-2143 | GAGCAUGGAAUCCCGGCCCTsT | 759 | GGGCCGGGAUUCCAUGCUCTsT | 760 | AD- | | 90 | | | | |
| | | | | | 9618 | | | | | | |
| 2125-2143 | GAGcAuGGAAucccGGcccTsT | 761 | GGGCCGGGAUUCcAUGCUCTsT | 762 | AD- | | 91 | | | | |
| | | | | | 9744 | | | | | | |
| 2230-2248 | GCCUACGCCGUAGACAACATT | 763 | UGUUGUCUACGGCGUAGGCTT | 764 | AD- | | | | 38 | | |
| | | | | | 15239 | | | | | | |
| 2231-2249 | CCCACGCCGUAGACAACACTT | 765 | GUGUUGUCUACGGCGUAGGTT | 766 | AD- | | | | 19 | | |
| | | | | | 15212 | | | | | | |
| 2232-2250 | CUACGCCGUAGACAACACGTT | 767 | CGUGUUGUCUACGGCGUAGTT | 768 | AD- | | | | 43 | | |
| | | | | | 15240 | | | | | | |
| 2233-2251 | UACGCCGUAGACAACACGUTT | 769 | ACGUGUUGUCUACGGCGUATT | 770 | AD- | | | | 59 | | |
| | | | | | 15177 | | | | | | |
| 2235-2253 | CGCCGUAGACAACACGUGUTT | 771 | ACACGUGUUGUCUACGGCGTT | 772 | AD- | | | | 13 | | |
| | | | | | 15179 | | | | | | |
| 2236-2254 | GCCGUAGACAACACGUGUGTT | 773 | CACACGUGUUGUCUACGGCTT | 774 | AD- | | | | 15 | | |
| | | | | | 15180 | | | | | | |
| 2237-2255 | CCGUAGACAACACGUGUGUTT | 775 | ACACACGUGUUGUCUACGGTT | 776 | AD- | | | | 14 | | |
| | | | | | 15241 | | | | | | |
| 2238-2256 | CGUAGACAACACGUGUGUATT | 777 | UACACACGUGUUGUCUACGTT | 778 | AD- | | | | 42 | | |
| | | | | | 15268 | | | | | | |
| 2240-2258 | UAGACAACACGUGUGUAGUTT | 779 | ACUACACACGUGUUGUCUATT | 780 | AD- | | | | 21 | | |
| | | | | | 15242 | | | | | | |
| 2341-2259 | AGACAACACGUGUGUAGUCTT | 781 | GACUACACACGUGUUGUCUTT | 782 | AD- | | | | 28 | | |
| | | | | | 15216 | | | | | | |
| 2242-2260 | GACAACACGUGUGUAGUCATT | 783 | UGACUACACACGUGUUGUCTT | 784 | AD- | | | | 35 | | |
| | | | | | 15176 | | | | | | |
| 2243-2261 | ACAACACGUGUGUAGUCAGTT | 785 | CUGACUACACACGUGUUGUTT | 786 | AD- | | | | 35 | | |
| | | | | | 15181 | | | | | | |
| 2244-2262 | CAACACGUGUGUAGUCAGGTT | 787 | CCUGACUACACACGUGUUGTT | 788 | AD- | | | | 22 | | |
| | | | | | 15243 | | | | | | |
| 2247-2265 | CACGUGUGUAGUCAGGAGCTT | 789 | GCUCCUGACUACACACGUGTT | 790 | AD- | | | | 42 | | |
| | | | | | 15182 | | | | | | |
| 2348-2266 | ACGUGUGUAGUCAGGAGCCTT | 791 | GGCUCCUGACUACACACGUTT | 792 | AD- | | | | 31 | | |
| | | | | | 15244 | | | | | | |
| 2249-2267 | CGUGUGUAGUCAGGAGCCGTT | 793 | CGGCUCCUGACUACACACGTT | 794 | AD- | | | | 23 | | |
| | | | | | 15387 | | | | | | |
| 2251-2269 | UGUGUAGUCAGGAGCCGGGTT | 795 | CCCGGCUCCUGACUACACATT | 796 | AD- | | | | 18 | | |
| | | | | | 15245 | | | | | | |
| 2257-2275 | GUCAGGAGCCGGGACGUCATsT | 797 | UGACGUCCCGGCUCCUGACTsT | 798 | AD- | | 34 | | | | |
| | | | | | 9555 | | | | | | |
| 2257-2275 | GucAGGAGccGGGAcGucATsT | 799 | UGACGUCCCGGCUCCUGACTsT | 800 | AD- | | 55 | | | | |
| | | | | | 9681 | | | | | | |
| 2258-2276 | UCAGGAGCCGGGACGUCAGTsT | 801 | CUGACGUCCCGGCUCCUGATsT | 802 | AD- | 42 | 61 | | | | |
| | | | | | 9619 | | | | | | |
| 2258-2276 | ucAGGAGccGGGAcGucAGTsT | 803 | CUGACGUCCCGGCUCCUGATsT | 804 | AD- | | 56 | | | | |
| | | | | | 9745 | | | | | | |
| 2259-2277 | CAGGAGCCGGGACGUCAGCTsT | 805 | GCUGACGUCCGGGCUCCUGTsT | 806 | AD- | 44 | 77 | | | | |
| | | | | | 9620 | | | | | | |
| 2259-2277 | cAGGAGccGGGAcGucAGcTsT | 807 | GCUGACGUCCCGGCUCCUGTsT | 808 | AD- | | 89 | | | | |
| | | | | | 9746 | | | | | | |
| 2263-2281 | AGCCGGGACGUCAGCACUATT | 809 | UAGUGCUGACGUCCCGGCUTT | 810 | AD- | | | | 19 | | |
| | | | | | 15288 | | | | | | |
| 2265-2283 | CCGGGACGUCAGCACUACATT | 811 | UGUAGUGCUGACGUCCCGGTT | 812 | AD- | | | | 16 | | |
| | | | | | 15246 | | | | | | |
| 2303-2321 | CCGUGACAGCCGUUGCCAUTT | 813 | AUGGCAACGGCUGUCACGGTT | 814 | AD- | | | | 37 | | |
| | | | | | 15289 | | | | | | |
| 2317-2335 | GCCAUCUGCUGCCGGAGCCTsT | 815 | GGCUCCGGCAGCAGAUGGCTsT | 816 | AD- | | 59 | 67 | | | |
| | | | | | 9324 | | | | | | |
| 2375-2393 | CCCAUCCCAGGAUGGGUGUTT | 817 | ACACCCAUCCUGGGAUGGGTT | 818 | AD- | | | | 103 | | |
| | | | | | 15329 | | | | | | |
| 2377-2395 | CAUCCCAGGAUGGGUGUCUTT | 819 | AGACACCCAUCCUGGGAUGTT | 820 | AD- | | | | 62 | | |
| | | | | | 15330 | | | | | | |
| 2420-2438 | AGCUUUAAAAUGGUUCCGATT | 821 | UCGGAACCAUUUUAAAGCUTT | 822 | AD- | | | | 22 | | |
| | | | | | 15169 | | | | | | |
| 2421-2439 | GCUUUAAAAUGGUUCCGACTT | 823 | GUCGGAACCAUUUUAAAGCTT | 824 | AD- | | | | 6 | | |
| | | | | | 15201 | | | | | | |
| 2422-2440 | CUUUAAAAUGGUUCCGACUTT | 825 | AGUCGGAACCAUUUUAAAGTT | 826 | AD- | | | | 14 | | |
| | | | | | 15331 | | | | | | |
| 2423-2441 | UUUAAAAUGGUUCCGACUUTT | 827 | AAGUCGGAACCAUUUUAAATT | 828 | AD- | | | | 47 | | |
| | | | | | 15190 | | | | | | |
| 2424-2442 | UUAAAAUGGUUCCGACUUGTT | 829 | CAAGUCGGAACCAUUUUAATT | 830 | AD- | | | | 61 | | |
| | | | | | 15247 | | | | | | |
| 2425-2443 | UAAAAUGGUUCCGACUUGUTT | 831 | ACAAGUCGGAACCAUUUUATT | 832 | AD- | | | | 22 | | |
| | | | | | 15248 | | | | | | |
| 2426-2444 | AAAAUGGUUCCGACUUGUCTT | 833 | GACAAGUCGGAACCAUUUUTT | 834 | AD- | | | | 45 | | |
| | | | | | 15175 | | | | | | |
| 2477-2445 | AAAUGGUUCCGACUUGUCCTT | 835 | GGACAAGUCGGAACCAUUUTT | 836 | AD- | | | | 51 | | |
| | | | | | 15249 | | | | | | |
| 2428-2446 | AAUGGUUCCGACUUGUCCCTT | 837 | GGGACAAGUCGGAACCAUUTT | 838 | AD- | | | | 96 | | |
| | | | | | 15250 | | | | | | |
| 2431-2449 | GGUUCCGACUUGUCCCUCUTT | 839 | AGAGGGACAAGUCGGAACCTT | 840 | AD- | | | | 12 | | |
| | | | | | 15400 | | | | | | |
| 2457-2475 | CUCCAUGGCCUGGCACGAGTT | 841 | CUCGUGCCAGGCCAUGGAGTT | 842 | AD- | | | | 22 | | |
| | | | | | 15332 | | | | | | |
| 2459-2477 | CCAUGGCCUGGCACGAGGGTT | 843 | CCCUCGUGCCAGGCCAUGGTT | 844 | AD- | | | 30 | | | |
| | | | | | 15388 | | | | | | |
| 2545-2563 | GAACUCACUCACUCUGGGUTT | 845 | ACCCAGAGUGAGUGAGUUCTT | 846 | AD- | | | | 20 | | |
| | | | | | 15333 | | | | | | |
| 2549-2567 | UCACUCACUCUGGGUGCCUTT | 847 | AGGCACCCAGAGUGAGUGATT | 848 | AD- | | | | 96 | | |
| | | | | | 15334 | | | | | | |
| 2616-2634 | UUUCACCAUUCAAACAGGUTT | 849 | ACCUGUUUGAAUGGUGAAATT | 850 | AD- | | | | 75 | | |
| | | | | | 15335 | | | | | | |
| 2622-2640 | CAUUCAAACAGGUCGAGCUTT | 851 | AGCUCGACCUGUUUGAAUGTT | 852 | AD- | | | | 16 | | |
| | | | | | 15183 | | | | | | |
| 2623-2641 | AUUCAAACAGGUCGAGCUGTT | 853 | CAGCUCGACCGUUUUGAAUTT | 854 | AD- | | | | 41 | | |
| | | | | | 15202 | | | | | | |
| 2624-2642 | UCCAAACAGGUCGAGCUGUTT | 855 | ACAGCUCGACCUGUUUGAATT | 856 | AD- | | | | 39 | | |
| | | | | | 15203 | | | | | | |
| 2625-2643 | UCAAACAGGUCGAGCUGUGTT | 857 | CACAGCUCGACCUGUUUGATT | 858 | AD- | | | | 49 | | |
| | | | | | 15272 | | | | | | |
| 2626-2644 | CAAACAGGUCGAGCUGUGCTT | 859 | GCACAGCUCGACCUGUUUGTT | 860 | AD- | | | | 16 | | |
| | | | | | 15217 | | | | | | |
| 2627-2645 | AAACAGGUCGAGCUGUGCUTT | 861 | AGCACAGCUCGACCUGUUUTT | 862 | AD- | | | | 15 | | |
| | | | | | 15290 | | | | | | |
| 2628-2546 | AACAGGUCGAGCUGUGCUCTT | 863 | GAGCACAGCUCGACCUGUUTT | 864 | AD- | | | | 13 | | |
| | | | | | 15218 | | | | | | |
| 2630-2648 | CAGGUCGAGCUGUGCUCGGTT | 865 | CCGAGCACAGCUCGACCUGTT | 866 | AD- | | | | 13 | | |
| | | | | | 15389 | | | | | | |
| 2631-2649 | AGGUCGAGCUGUGCCCGGGTT | 867 | CCCGAGCACAGCUCGACCUTT | 868 | AD- | | | | 40 | | |
| | | | | | 15336 | | | | | | |
| 2633-2651 | GUCGAGCUGUGCUCGGGUGTT | 869 | CACCCGAGCACAGCUCGACTT | 870 | AD- | | | | 19 | | |
| | | | | | 15337 | | | | | | |
| 2634-2652 | UCGAGCUGUGCUCGGGUGCTT | 871 | GCACCCGAGCACAGCUCGATT | 872 | AD- | | | | 33 | | |
| | | | | | 15191 | | | | | | |
| 2657-2675 | AGCUGCUCCCAAUGUGCCGTT | 873 | CGGCACAUUGGGAGCAGCUTT | 874 | AD- | | | | 25 | | |
| | | | | | 15390 | | | | | | |
| 2658-2676 | GCUGCUCCCAAUGUGCCGATT | 875 | UCGGCACAUUGGGAGCAGCTT | 876 | AD- | | | | 9 | | |
| | | | | | 15338 | | | | | | |
| 2660-2678 | UGCUCCCAAUGUGCCGAUGTT | 877 | CAUCGGCACAUUGGGAGCATT | 878 | AD- | | | | 33 | | |
| | | | | | 15204 | | | | | | |
| 2663-2681 | UCCCAAUGUGCCGAUGUCCTT | 879 | GGACAUCGGCACAUUGGGATT | 880 | AD- | | | | 76 | | |
| | | | | | 15251 | | | | | | |
| 2665-2683 | CCAAUGUGCCGAUGUCCGUTT | 881 | ACGGACAUCGGCACAUUGGTT | 882 | AD- | | | | 14 | | |
| | | | | | 15205 | | | | | | |
| 2666-2684 | CAAUGUGCCGAUGUCCGUGTT | 883 | CACGGACAUCGGCACAUUGTT | 884 | AD- | | | | 16 | | |
| | | | | | 15171 | | | | | | |
| 2667-2683 | AAUGUGCCGAUGUCCGUGGTT | 885 | CCACGGACAUCGGCACAUUTT | 886 | AD- | | | | 58 | | |
| | | | | | 15252 | | | | | | |
| 2673-2691 | CCGAUGUCCGUGGGCAGAATT | 887 | UUCUGCCCACGGACAUCGGTT | 888 | AD- | | | | 20 | | |
| | | | | | 15339 | | | | | | |
| 2675-2693 | GAUGUCCGUGGGCAGAAUGTT | 889 | CAUUCUGCCCACGGACAUCTT | 890 | AD- | | | | 15 | | |
| | | | | | 15253 | | | | | | |
| 2678-2696 | GUCCGUGGGCAGAAUGACUTT | 891 | AGUCAUUCUGCCCACGGACTT | 892 | AD- | | | | 18 | | |
| | | | | | 15340 | | | | | | |
| 2679-2697 | UCCGUGGGCAGAAUGACUUTT | 893 | AAGUCAUUCUGCCCACGGATT | 894 | AD- | | | | 17 | | |
| | | | | | 15291 | | | | | | |
| 2683-2701 | UGGGCAGAAUGACUUUUAUTT | 895 | AUAAAAGUCAUUCUGCCCATT | 896 | AD- | | | | 11 | | |
| | | | | | 15341 | | | | | | |
| 2694-2712 | ACUUUUAUUGAGCUCUUGUTT | 897 | ACAAGAGCUCAAUAAAAGUTT | 898 | AD- | | | | 13 | | |
| | | | | | 15401 | | | | | | |
| 2700-2718 | AUUGAGCUCUUGUUCCGUGTT | 899 | CACGGAACAAGAGCUCAAUTT | 900 | AD- | | | | 30 | | |
| | | | | | 15342 | | | | | | |
| 2704-2722 | AGCUCUUGUUCCGUGCCAGTT | 901 | CUGGCACGGAACAAGAGCUTT | 902 | AD- | | | | 21 | | |
| | | | | | 15343 | | | | | | |
| 2705-2723 | GCUCUUGUUCCGUGCCAGGTT | 903 | CCUGGCACGGAACAAGAGCTT | 904 | AD- | | | | 16 | | |
| | | | | | 15292 | | | | | | |
| 2710-2728 | UGUUCCGUGCCAGGCAUUCTT | 905 | GAAUGCCUGGCACGGAACATT | 906 | AD- | | | | 20 | | |
| | | | | | 15344 | | | | | | |
| 2711-2729 | GUUCCGUGCCAGGCAUUCATT | 907 | UGAAUGCCUGGCACGGAACTT | 908 | AD- | | | | 18 | | |
| | | | | | 15254 | | | | | | |
| 2712-2730 | UUCCGUGCCAGGCAUUCAATT | 909 | UUGAAUGCCUGGCACGGAATT | 910 | AD- | | | | 18 | | |
| | | | | | 15345 | | | | | | |
| 2715-2733 | CGUGCCAGGCAUUCAAUCCTT | 911 | GGAUUGAAUGCCUGGCACGTT | 912 | AD- | | | | 15 | | |
| | | | | | 15206 | | | | | | |
| 2716-2734 | GUGCCAGGCAUUCAAUCCUTT | 913 | AGGAUUGAAUGCCUGGCACTT | 914 | AD- | | | | 16 | | |
| | | | | | 15346 | | | | | | |
| 2728-2746 | CAAUCCUCAGGUCUCCACCTT | 915 | GGUGGAGACCUGAGGAUUGTT | 916 | AD- | | | | 62 | | |
| | | | | | 15347 | | | | | | |
| 2743-2761 | CACCAAGGAGGCAGGAUUCTsT | 917 | GAAUCCUGCCUCCUUGGUGTsT | 918 | AD- | | 33 | 31 | | | |
| | | | | | 9577 | | | | | | |
| 2743-2761 | cAccAAGGAGGcAGGAuucTsT | 919 | GAAUCCUGCCUCCUUGGUGTsT | 920 | AD- | | 17 | 26 | | | |
| | | | | | 9703 | | | | | | |
| 2743-2761 | CfaCfcAfaGfgAfgGfcAfgGfaCfuCfTsT | 921 | p-gAfaUfcDfuGfcCfuCfcUfuGfgUfgTsT | 922 | AD- | | | | 22 | | |
| | | | | | 14678 | | | | | | |
| 2743-2761 | CfACfCfAAGGAGGCfAGGAUfCfCfTsT | 923 | GAAUfCfCfUfGCfCfUfCfCfUfUfGGUfGTs | 924 | AD- | | | | 23 | | |
| | | | T | | 14688 | | | | | | |
| 2743-2761 | CuCcAaGgAgGcAgGaUuCTsT | 925 | p-gAfaUfcCfuGfcCfuCfcUfuGfgUfgTsT | 926 | AD- | | | | 23 | | |
| | | | | | 14698 | | | | | | |
| 2743-2761 | CaCcAuGgAgGcAgGuUuCTsT | 927 | GAAUfCfCfGfGCfCfUfCfCfUfUfGTs | 928 | AD- | | | | 14 | | |
| | | | T | | 14708 | | | | | | |
| 2743-2761 | CfaCfcAfaGfgAfgGfcAfgGfaUfuCfTsT | 929 | GAAUCcuGCcuCCUUCgcgTsT | 930 | AD- | | | | 31 | | |
| | | | | | 14718 | | | | | | |
| 2743-2761 | CfACfCfAAGGAGGCfAGGAUfUfCfTsT | 931 | GAAUCcuGCcuCCUUGgcgTsT | 932 | AD- | | | | 25 | | |
| | | | | | 14728 | | | | | | |
| 2743-2761 | CaCcAuGgAgGcAgGaUuCTsT | 933 | GAAUCcuGCcUCCUUGgugTsT | 934 | AD- | | | | 31 | | |
| | | | | | 14738 | | | | | | |
| 2743-2761 | GfgCfcUfGGfaGfuAfuUfcGfgAfTsT | 935 | p-uCfcGfaAfuAfaAfcUfcCfaGfgCfcTsT | 936 | AD- | | | | 19 | | |
| | | | | | 15084 | | | | | | |
| 2743-2761 | GGCfCfUfGGAGUfUfUfAUfUfCfGGATsT | 937 | UfCfCfGAAUfAAACfUfCfCfAGGCfCfTsT | 938 | AD- | | | | 31 | | |
| | | | | | 15094 | | | | | | |
| 2743-2761 | GgCcuGGaGuUuAuUcGgATsT | 939 | p-a-CfcGfaAfuAfaAfcUfcCfuGfgCfcTsT | 940 | AD- | | | | 16 | | |
| | | | | | 15104 | | | | | | |
| 2743-2761 | GgCcUgGaGuUuAuUcGgATsT | 941 | UfCfCfGAAUfAAACfUfCfCfAGGCfCfTsT | 942 | AD- | | | | 15 | | |
| | | | | | 15114 | | | | | | |
| 2743-2761 | GfgCfcUfgGfaGfuUfuAfuUfcGfgAfTsT | 943 | UCCGAauAAacUCCAGgCCTsT | 944 | AD- | | | | 11 | | |
| | | | | | 15124 | | | | | | |
| 2743-2761 | CCCfCfUfGGAGUfUfUfAUfUfCfGGATsT | 945 | UCCGAauAAacUCCAGgccTsT | 946 | AD- | | | | 12 | | |
| | | | | | 15134 | | | | | | |
| 2743-2761 | GgCcUgGaGuUuAuUcGgATsT | 947 | UCCGAauAAucUCCAGgccTsT | 948 | AD- | | | | 9 | | |
| | | | | | 15144 | | | | | | |
| 2753-2771 | GCAGGAUUCUUCCCAUGGATT | 949 | UCCAUGGGAAGAAUCCUGCTT | 950 | AD- | | | | 7 | | |
| | | | | | 15391 | | | | | | |
| 2794-2812 | UGCAGGGACAAACAUCGUUTT | 951 | AACGAUGUUUGUCCCUGCATT | 952 | AD- | | | | 13 | | |
| | | | | | 15348 | | | | | | |
| 2795-2813 | GCAGGGACAAACAUCGUUGTT | 953 | CAACGAUGUUUGUCCCUGCTT | 954 | AD- | | | | 8 | | |
| | | | | | 15349 | | | | | | |
| 2798-2815 | AGGGACAAACAUCGUUGGGTT | 955 | CCCAACGAUGUUUGUCCCUTT | 956 | AD- | | | | 40 | | |
| | | | | | 15170 | | | | | | |
| 2841-2859 | CCCUCAUCUCCAGCUAACUTT | 957 | AGUUAGCUGGAGAUGAGGGTT | 958 | AD- | | | | 14 | | |
| | | | | | 15350 | | | | | | |
| 2845-2863 | CAUCUCCAGCUAACUGUGGTT | 959 | CCACAGUUAGCUGGAGAUGTT | 960 | AD- | | | | 27 | | |
| | | | | | 15402 | | | | | | |
| 2878-2896 | GCUCCCUGAUUAAUGGAGGTT | 961 | CCUCCAUUAAUCAGGGAGCTT | 962 | AD- | | | | 27 | | |
| | | | | | 15293 | | | | | | |
| 2881-2899 | CCCUGAUUAAUGGAGGCUUTT | 963 | AAGCCGCCAUUAAUCAGGGTT | 964 | AD- | | | | 14 | | |
| | | | | | 15351 | | | | | | |
| 2882-2900 | CCUGAUUAAUGGAGGCUUATT | 965 | UAAGCCUCCAUUAAUCAGGTT | 966 | AD- | | | | 11 | | |
| | | | | | 15403 | | | | | | |
| 2884-2902 | UGAUUAAUGGAGGCUUAGCTT | 967 | GCUAAGCCUCCAUUAAUCATT | 968 | AD- | | | | 38 | | |
| | | | | | 15404 | | | | | | |
| 2885-2903 | GAUUAAUGGAGGCUUAGCUTT | 969 | AGCUAAGCCUCCAUUAAUCTT | 970 | AD- | | | | 15 | | |
| | | | | | 15207 | | | | | | |
| 2886-2904 | AUUAAUGGAGGCUUAGCUUTT | 971 | AAGCUAAGCCUCCAGUAAUTT | 972 | AD- | | | | 23 | | |
| | | | | | 15352 | | | | | | |
| 2887-2905 | UUAAUGGAGGCUUAGCUUUTT | 973 | AAAGCCAAGCCUCCAUUAATT | 974 | AD- | | | | 31 | | |
| | | | | | 15255 | | | | | | |
| 2903-2921 | UUUCUGGAUGGCAUCUAGCTsT | 975 | GCUAGAUGCCAUCCAGAAATsT | 976 | AD- | | 123 | | | | |
| | | | | | 9603 | | | | | | |
| 2903-2921 | uuacuGGAuGGcAucuAGcTsT | 977 | GCuAGAUGCcAUCcAGAAATsT | 978 | AD- | | 56 | | | | |
| | | | | | 9729 | | | | | | |
| 2904-2922 | UUCUGCAUGGCAUCUAGCCTsT | 979 | GGCUAGAUGCCAUCCAGAATsT | 980 | AD- | | 139 | | | | |
| | | | | | 9599 | | | | | | |
| 2904-2922 | uucuGGAuGGcAucuAGccTsT | 981 | GGCuAGAUGCcAUCcAGAATsT | 982 | AD- | | 38 | | | | |
| | | | | | 9725 | | | | | | |
| 2905-2923 | UCUGGAUGGCAUCUAGCCATsT | 983 | UGGCUAGAUGCCAUCCAGATsT | 984 | AD- | | 77 | | | | |
| | | | | | 9621 | | | | | | |
| 2905-2923 | ucuGGAuGGcAucuAGccATsT | 985 | UGGCuAGAUGCcAUCcAGATsT | 986 | AD- | | 63 | | | | |
| | | | | | 9747 | | | | | | |
| 2925-2943 | AGGCUGGAGACAGGUGCGCTT | 987 | GCGCACCUGUCUCCAGCCUTT | 988 | AD- | | | | 32 | | |
| | | | | | 15405 | | | | | | |
| 2926-2944 | GGCUGGAGACAGGUGCGCCTT | 989 | GGCGCACCUGUCUCCAGCCTT | 990 | AD- | | | | 39 | | |
| | | | | | 15353 | | | | | | |
| 2927-2945 | GCUGGAGACAGGUGCGCCCTT | 991 | GGGCGCACCUGUCUCCAGCTT | 992 | AD- | | | | 49 | | |
| | | | | | 15354 | | | | | | |
| 2972-2990 | UUCCUGAGCCACCUUUACUTT | 993 | AGUAAAGGUGGCUCAGGAATT | 994 | AD- | | | | 35 | | |
| | | | | | 15406 | | | | | | |
| 2973-2991 | UCCUGAGCCACCUUUACUCTT | 995 | GAGUAAAGGUGGCUCAGGATT | 996 | AD- | | | | 39 | | |
| | | | | | 15407 | | | | | | |
| 2974-2992 | CCUGAGCCACCUUUACUCUTT | 997 | AGAGUAAAGGUGGCUCAGGTT | 998 | AD- | | | | 18 | | |
| | | | | | 15355 | | | | | | |
| 2976-2994 | UGAGCCACCUUUACUCUGCTT | 999 | GCAGAGUAAAGGUGGCUCATT | 1000 | AD- | | | | 50 | | |
| | | | | | 15356 | | | | | | |
| 2978-2996 | AGCCACCUUUACUCUGCUCTT | 1001 | GAGCAGAGUAAAGGUGGCUTT | 1002 | AD- | | | | 54 | | |
| | | | | | 15357 | | | | | | |
| 2981-2999 | CACCUUUACUCUGCUCUAUTT | 1003 | AUAGAGCAGAGUAAAGGUGTT | 1004 | AD- | | | | 23 | | |
| | | | | | 15269 | | | | | | |
| 2987-3005 | UACUCUGCUCUAUGCCAGGTsT | 1005 | CCUGGCAUAGAGCAGAGUATsT | 1006 | AD- | | 74 | | | | |
| | | | | | 9565 | | | | | | |
| 2987-3005 | uAcucuGcucuAuGccAGGTsT | 1007 | CCUGGcAuAGAGcAGAGuATsT | 1008 | AD- | | 49 | | | | |
| | | | | | 9691 | | | | | | |
| 2998-3016 | AUGCCAGGCUGUGCUAGCATT | 1009 | UGCUAGCACAGCCUGGCAUTT | 1010 | AD- | | | | 12 | | |
| | | | | | 15358 | | | | | | |
| 303-3021 | AGGCUGUGCUAGCAACACCTT | 1011 | GGUGUUGCUAGCACAGCCUTT | 1012 | AD- | | | | 24 | | |
| | | | | | 15359 | | | | | | |
| 3006-3024 | CUGUGCUAGCAACACCCAATT | 1013 | UUGGGUGUUGCUAGCACAGTT | 1014 | AD- | | | | 13 | | |
| | | | | | 15360 | | | | | | |
| 3010-3028 | GCUAGCAACACCCAAAGGUTT | 1015 | ACCUUUGGGUGUUGCUAGCTT | 1016 | AD- | | | | 19 | | |
| | | | | | 15219 | | | | | | |
| 3038-3056 | GGAGCCAUCACCUAGGACUTT | 1017 | AGUCCUAGGUGAUGGCUCCTT | 1018 | AD- | | | | 24 | | |
| | | | | | 15361 | | | | | | |
| 3046-3064 | CACCUAGGACUGACUCGGCTT | 1019 | GCCGAGUCAGUCCUAGGUGTT | 1020 | AD- | | | | 36 | | |
| | | | | | 15273 | | | | | | |
| 3051-3069 | AGGACUGACUCGGCAGUGUTT | 1021 | ACACUGCCGAGUCAGUCCGTT | 1022 | AD- | | | | 31 | | |
| | | | | | 15362 | | | | | | |
| 3052-3070 | GGACUGACUCGGCAGUGUGTT | 1023 | CACACUGCCGAGCCAGUCCTT | 1024 | AD- | | | | 20 | | |
| | | | | | 15192 | | | | | | |
| 3074-3092 | UGGUGCAUGCACUGUCUCATT | 1025 | UGAGACAGUGCAUGCACCATT | 1026 | AD- | | | | 19 | | |
| | | | | | 15256 | | | | | | |
| 3080-3098 | AUGCACUGUCUCAGCCAACTT | 1027 | GUUGGCUGAGACAGUGCAUTT | 1028 | AD- | | | | 33 | | |
| | | | | | 15363 | | | | | | |
| 3085-3103 | CUGUCUCAGCCAACCCGCUTT | 1029 | AGCGGGUUGGCUGAGACAGTT | 1030 | AD- | | | | 24 | | |
| | | | | | 15364 | | | | | | |
| 3089-3107 | CUCAGCCAACCCGCUCCACTsT | 1031 | GUGGAGCGGGUUGGCUGAGTsT | 1032 | AD- | 35 | 49 | | | | |
| | | | | | 9604 | | | | | | |
| 3089-3107 | cucAGccAAcccGcuccAcTsT | 1033 | GUGGAGCGGGUUGGCUGAGTsT | 1034 | AD- | | 85 | | | | |
| | | | | | 9730 | | | | | | |
| 3093-3111 | GCCAACCCGCUCCACUACCTsT | 1035 | GGUAGUGGAGCGGGUUGGCTsT | 1036 | AD- | | 45 | | | | |
| | | | | | 9527 | | | | | | |
| 3093-3111 | GccAAcccGcuccAcuAccTsT | 1037 | GGuAGUGGAGCGGGUUGGCTsT | 1038 | AD- | | 86 | | | | |
| | | | | | 9653 | | | | | | |
| 3096-3114 | AACCCGCUCCACUACCCGGTT | 1039 | CCGGGUAGUGGAGCGGGUUTT | 1040 | AD- | | | | 62 | | |
| | | | | | 15365 | | | | | | |
| 3099-3117 | CCGCUCCACUACCCGGCAGTT | 1041 | CUGCCGGGUAGUGGAGCGGTT | 1042 | AD- | | | | 30 | | |
| | | | | | 15294 | | | | | | |
| 3107-3125 | CUACCCGGCAGGGUACACATT | 1043 | UGUGUACCCUGCCGGGUAGTT | 1044 | AD- | | | | 12 | | |
| | | | | | 15173 | | | | | | |
| 3108-3126 | UACCCGGCAGGGUACACAUTT | 1045 | AUGUGUACCCUGCCGGGUATT | 1046 | AD- | | | | 21 | | |
| | | | | | 15366 | | | | | | |
| 3109-3127 | ACCCGGCAGGGUACACAUUTT | 1047 | AAUGUGUACCCUGCCGGGUTT | 1048 | AD- | | | | 11 | | |
| | | | | | 15367 | | | | | | |
| 3110-3128 | CCCGGCAGGGUACACAUUCTT | 1049 | GAAUGUGUACCCUGCCGGGTT | 1050 | AD- | | | | 18 | | |
| | | | | | 15257 | | | | | | |
| 3112-3139 | CGGCAGGGUACACAUUCGCTT | 1051 | GCGAAUGUGUACCCUGCCGTT | 1052 | AD- | | | | 50 | | |
| | | | | | 15184 | | | | | | |
| 3114-3132 | GCAGGGUACACAUUCGCACTT | 1053 | GUGCGAAUGUGUACCCUGCTT | 1054 | AD- | | | | 12 | | |
| | | | | | 15185 | | | | | | |
| 3115-3133 | CAGGGUACACAUUCGCACCTT | 1055 | GGUGCGAAUGUGUACCCUGTT | 1056 | AD- | | | | 73 | | |
| | | | | | 15258 | | | | | | |
| 3116-3134 | AGGGUACACAUUCGCACCCTT | 1057 | GGGUGCGAAUGUGUACCCUTT | 1058 | AD- | | | | 36 | | |
| | | | | | 15186 | | | | | | |
| 3196-3214 | GGAACUGAGCCAGAAACGCTT | 1059 | GCGUUUCUGGCUCAGUUCCTT | 1060 | AD- | | | | 19 | | |
| | | | | | 15274 | | | | | | |
| 3197-3215 | GAACUGAGCCAGAAACGCATT | 1061 | UGCGUUUCUGGCUCAGUUCTT | 1062 | AD- | | | | 7 | | |
| | | | | | 15368 | | | | | | |
| 3198-3216 | AACUGAGCCAGAAACGCAGTT | 1063 | CUGCGUUUCUGGCUCAGUUTT | 1064 | AD- | | | | 17 | | |
| | | | | | 15369 | | | | | | |
| 3201-3219 | UGACCCAGAAACGCAGAUUTT | 1065 | AAUCUGCGUUUCUGGCUCATT | 1066 | AD- | | | | 19 | | |
| | | | | | 15370 | | | | | | |
| 3207-3225 | AGAAACGCAGAUUGGGCUGTT | 1067 | CAGCCCAAUCUGCGUUUCUTT | 1068 | AD- | | | | 38 | | |
| | | | | | 15259 | | | | | | |
| 3210-3228 | AACGCAGAUUGGGCUGGCUTT | 1069 | AGCCAGCCCAAUCUGCGUUTT | 1070 | AD- | | | | 52 | | |
| | | | | | 15408 | | | | | | |
| 3233-3251 | AGCCAAGCCUCUUCUUACUTsT | 1071 | AGUAAGAAGAGGCUUGGCUTsT | 1072 | AD- | | 23 | 21 | | 0.04 | |
| | | | | | 9597 | | | | | | |
| 3233-3251 | AGccAAGccucuucuuAcuTsT | 1073 | AGuAAGAAGAGGCUUGGCUTsT | 1073 | AD- | | 12 | 26 | | | |
| | | | | | 9723 | | | | | | |
| 3233-3251 | AfgCfcAfuGfcCfuCfuUfcUfuAfcUfTsT | 1075 | p-aGfuAfaGfaAfgAfgGfcUfuGfgCfuTsT | 1075 | AD- | | | | 15 | | |
| | | | | | 14680 | | | | | | |
| 3233-3251 | AGCfCfAAGCfCfUfCfUfUfCfUfUfACfUfTsT | 1077 | AGUfAAGAAGAGGCfUfUfGGCfUfTsT | 1078 | AD- | | | | 18 | | |
| | | | | | 14690 | | | | | | |
| 3233-3251 | AgCcAaGcCuCuUcUuAcUTsT | 1079 | p-aGfuAfaGfaAfgAfgGfcUfcGfgCfuTsT | 1080 | AD- | | | | 15 | | |
| | | | | | 14700 | | | | | | |
| 3233-3251 | AgCcAaGcCuCuUcUuAcUTsT | 1081 | AGUfAAGAAGAGGCfUfCfGGCfUfTsT | 1082 | AD- | | | | 15 | | |
| | | | | | 14710 | | | | | | |
| 3233-3251 | AfgCfcAfuGfcCfuCfuUfcUfuAfcUfTsT | 1083 | AGUAAgaAGagGCUUGgcuTsT | 1084 | AD- | | | | 18 | | |
| | | | | | 14720 | | | | | | |
| 3233-3251 | AGCfCfAAGCfCfUfCfUfUfCfUfUfACfUfTsT | 1085 | AGUAAgaAGaGGCUUGgcuTsT | 1086 | AD- | | | | 18 | | |
| | | | | | 14730 | | | | | | |
| 3233-3251 | AgCcAaGcCuCuUcUuAcUTsT | 1087 | AGUAAgaAGagGCUUGgcaTsT | 1088 | AD- | | | | 17 | | |
| | | | | | 14740 | | | | | | |
| 3233-3251 | UfgGfuUfcCfcUfgAfgGfaCfcAfgCfTsT | 1089 | p-gCfuGfgUfcCfuCfuGfgGfaAfcCfaTsT | 1090 | AD- | | | | 85 | | |
| | | | | | 15086 | | | | | | |
| 3233-3251 | UfGGUfUfCfCfCfUfGAGGACfCfAGCfTsT | 1091 | GCfUfGGUfCfCfUfCfAGGGAACfCfATsT | 1092 | AD- | | | | 70 | | |
| | | | | | 15096 | | | | | | |
| 3233-3251 | UgGuUcCcUgAgGaCcAgCTsT | 1093 | p-gCfugFGuFcCfuCfaGfgGfaAfcCfaTsT | 1094 | AD- | | | | 71 | | |
| | | | | | 15106 | | | | | | |
| 3233-3251 | UgGuUcCcUgAgGuCcAgCTsT | 1095 | GCfUfGGUfCfCfUfCfAGGGAACfCfATsT | 1096 | AD- | | | | 73 | | |
| | | | | | 15116 | | | | | | |
| 3233-3251 | UfgGfuUfcCfcUfgAfgGfaCfcAfgCfTsT | 1097 | GCUGGucCUcuGGGAAccaTsT | 1098 | AD- | | | | 71 | | |
| | | | | | 15126 | | | | | | |
| 3233-3251 | UfGGUfUfCfCfCfUfGAGGACfCfAGCfTsT | 1099 | GCUGGucCUcaGGGAAccaTsT | 1100 | AD- | | | | 56 | | |
| | | | | | 15136 | | | | | | |
| 3233-3251 | UgGuUcCcUgAgGaCcAgCTsT | 1101 | GCUGGucCUcaGGGAAccaTsT | 1102 | AD- | | | | 72 | | |
| | | | | | 15146 | | | | | | |
| 3242-3260 | UCUUCUUACUUCACCCGGCTT | 1103 | GCCGGGUGAAGUAAGAAGATT | 1104 | AD- | | | | 79 | | |
| | | | | | 15260 | | | | | | |
| 3243-3261 | CUUCUUACUUCACCCGGCUTT | 1105 | AGCCGGGUGAAGUAAGAAGTT | 1106 | AD- | | | | 24 | | |
| | | | | | 15371 | | | | | | |
| 3244-3262 | UUCUUACUUCACCCGGCUGTT | 1107 | CAGCCGGGUGAAGUAAGAATT | 1108 | AD- | | | | 52 | | |
| | | | | | 15372 | | | | | | |
| 3262-3280 | GGGCUCCUCAUUUUUACGGTT | 1109 | CCGUAAAAAUGAGGAGCCCTT | 1110 | AD- | | | | 27 | | |
| | | | | | 15172 | | | | | | |
| 3263-3281 | GGCUCCUCAUUUUUACGGGTT | 1111 | CCCGUAAAAAUGAGGAGCCTT | 1112 | AD- | | | | 22 | | |
| | | | | | 15295 | | | | | | |
| 3264-3282 | GCUCCUCAUUUUUACGGGUTT | 1113 | ACCCGUAAAAAUGAGGAGCTT | 1114 | AD- | | | | 11 | | |
| | | | | | 15373 | | | | | | |
| 3263-3283 | CUCCUCAUUUUUACGGGUATT | 1115 | UACCCGUAAAAAUGAGGAGTT | 1116 | AD- | | | | 18 | | |
| | | | | | 15163 | | | | | | |
| 3266-3284 | UCCUCAUUUUUACGGGUAATT | 1117 | UUACCCGUAAAAAUGAGGATT | 1118 | AD- | | | | 13 | | |
| | | | | | 15165 | | | | | | |
| 3267-3285 | CCUCAUUUUUACGGGUAACTT | 1119 | GUUACCCGGAAAAAUGAGGTT | 1120 | AD- | | | | 23 | | |
| | | | | | 15374 | | | | | | |
| 3268-3286 | CUCAUUUUUACGGGUAACATT | 1121 | UGUUACCCGUAAAAAUGAGTT | 1122 | AD- | | | | 13 | | |
| | | | | | 15296 | | | | | | |
| 3270-3288 | CAUUUUUACGGGUAACAGUTT | 1123 | ACUGUUACCCGUAAAAAUGTT | 1124 | AD- | | | | 20 | | |
| | | | | | 15261 | | | | | | |
| 3271-3289 | AUUUUUACGGGUAACAGUGTT | 1125 | CACUGUUACCCGUAAAAAUTT | 1126 | AD- | | | | 90 | | |
| | | | | | 15375 | | | | | | |
| 3274-3292 | UUUACGGGUAACAGUGAGGTT | 1127 | CCUCACUGUUACCCGUAAATT | 1128 | AD- | | | | 72 | | |
| | | | | | 15262 | | | | | | |
| 3308-3326 | CAGACCAGGAAGCUCGGUGTT | 1129 | CACCGAGCUUCCUGGUCUGTT | 1130 | AD- | | | | 14 | | |
| | | | | | 15376 | | | | | | |
| 3310-3328 | GACCAGGAAGCUCGGUGAGTT | 1131 | CUCACCGAGCUUCCUGGUCTT | 1132 | AD- | | | | 19 | | |
| | | | | | 15377 | | | | | | |
| 3312-3330 | CCAGGAAGCUCGGUGAGUGTT | 1133 | CACUCACCGAGCUUCCUGGTT | 1134 | AD- | | | | 17 | | |
| | | | | | 15409 | | | | | | |
| 3315-3333 | GGAAGCUCGGUGAGUGAUGTT | 1135 | CAUCACUCACCGAGCUUCCTT | 1136 | AD- | | | | 18 | | |
| | | | | | 15378 | | | | | | |
| 3324-3342 | GUGAGUGAUGGCAGAACGATT | 1137 | UCGUUCUGCCAUCACUCACTT | 1138 | AD- | | | | 8 | | |
| | | | | | 15410 | | | | | | |
| 3326-3344 | GAGUGAUGGCAGAACGAUGTT | 1139 | CAUCGUUCUGCCAUCACUCTT | 1140 | AD- | | | | 11 | | |
| | | | | | 15379 | | | | | | |
| 3330-3348 | GAUGGCAGAACGAUGCCUGTT | 1141 | CAGGCAUCGUUCUGCCAUCTT | 1142 | AD- | | | | 36 | | |
| | | | | | 15187 | | | | | | |
| 3336-3354 | AGAACGAUGCCUGCAGGCATT | 1143 | UGCCUGCAGGCAUCGUUCUTT | 1144 | AD- | | | | 18 | | |
| | | | | | 15263 | | | | | | |
| 3339-3357 | ACGAUGCCUGCAGGCAUGGTT | 1145 | CCAUGCCUGCAGGCAUCGUTT | 1146 | AD- | | | | 75 | | |
| | | | | | 15264 | | | | | | |
| 3348-3366 | GCAGGCAUGGAACUUUUUCTT | 1147 | GAAAAAGUUCCAUGCCUGCTT | 1148 | AD- | | | | 21 | | |
| | | | | | 15297 | | | | | | |
| 3356-3374 | GGAACUUUUUCCGUUAUCATT | 1149 | UGAUAACGGAAAAAGUUCCTT | 1150 | AD- | | | | 6 | | |
| | | | | | 15208 | | | | | | |
| 3357-3375 | GAACUUUUUCCGUUAUCACTT | 1151 | GUGAGAACGGAAAAAGUUCTT | 1152 | AD- | | | | 28 | | |
| | | | | | 15209 | | | | | | |
| 3358-3376 | AACUUUUUCCGUUAUCACCTT | 1153 | GGUGAUAACGGAAAAAGUUTT | 1154 | AD- | | | | 131 | | |
| | | | | | 15193 | | | | | | |
| 3370-3388 | UAUCACCCAGGCCUGAUUCTT | 1155 | GAAUCAGGCCUGGGUGAUATT | 1156 | AD- | | | | 88 | | |
| | | | | | 15380 | | | | | | |
| 3378-3396 | AGGCCUGAUUCACUGGCCUTT | 1157 | AGGCCAGUGAAUCAGGCCUTT | 1158 | AD- | | | | 43 | | |
| | | | | | 15298 | | | | | | |
| 3383-3401 | UGAUUCACUGGCCUGGCGGTT | 1159 | CCGCCAGGCCAGUGAAUCATT | 1160 | AD- | | | | 99 | | |
| | | | | | 15299 | | | | | | |
| 3385-3403 | AUUCACUGGCCUGGCGGAGTT | 1161 | CUCCGCCAGGCCAGUGAAUTT | 1162 | AD- | | | | 95 | | |
| | | | | | 15265 | | | | | | |
| 3406-3424 | GCUUCUAAGGCAUGGUCGGTT | 1163 | CCGACCAUGCCUUAGAAGCTT | 1164 | AD- | | | | 18 | | |
| | | | | | 15381 | | | | | | |
| 3407-3425 | CUUCUAAGGCAUGGUCGGGTT | 1165 | CCCGACCAUGCCUUAGAAGTT | 1166 | AD- | | | | 40 | | |
| | | | | | 15210 | | | | | | |
| 3429-3447 | GAGGGCCAACAACUGUCCCTT | 1167 | GGGACAGUCGUUGGCCCUCTT | 1168 | AD- | | | | 83 | | |
| | | | | | 15270 | | | | | | |
| 3440-3458 | ACUGUCCCUCCUUGAGCACTsT | 1169 | GUGCUCAAGGAGGGACAGUTsT | 1170 | AD- | 75 | 95 | | | | |
| | | | | | 9591 | | | | | | |
| 3440-3458 | AcuGucccuccuuGAGcAcTsT | 1171 | GUGCUcAAGGAGGGAcAGUTsT | 1172 | AD- | | 105 | | | | |
| | | | | | 9717 | | | | | | |
| 3441-3459 | CUGUCCCUCCUUGAGCACCTsT | 1173 | GGUGCUCAAGGAGGGACAGTsT | 1174 | AD- | | 94 | | | | |
| | | | | | 9622 | | | | | | |
| 3441-3459 | cuGucccuccuuGAGcAccTsT | 1175 | GGUGCUcAAGGAGGGAcAGTsT | 1176 | AD- | | 103 | | | | |
| | | | | | 9748 | | | | | | |
| 3480-3498 | ACAUUUAUCUUUUGGGUCUTsT | 1177 | AGACCAAAGAUAAAUGUTsT | 1178 | AD- | | 63 | 49 | | | |
| | | | | | 9587 | | | | | | |
| 3480-3498 | AcAuuuAucuuuuGGGucuTsT | 1179 | AGACCcAAAAGAuAAAUGUTsT | 1180 | AD- | | 22 | 25 | | | |
| | | | | | 9713 | | | | | | |
| 3480-3498 | AfcAfuUfuAfuCfuUfuUfgGfgUfcUfTsT | 1181 | p-aGfuCfcCfaAfaAfgAfuAfaAfuGfuTsT | 1182 | AD- | | | | 19 | | |
| | | | | | 14679 | | | | | | |
| 3480-3498 | ACfAUfUfUfAUfCfUfUfCfUfGGGUfCfUfTs | 1183 | AGACfCfCfAAAAGAUfAAAfGUfTsT | 1184 | AD- | | | | 24 | | |
| | T | | | | 14689 | | | | | | |
| 3480-3498 | AcAuUuAuCaUuUgGgUcUTsT | 1185 | p-aGfaCfcCfaAfaAfgAfuAfaAfuGfuTsT | 1186 | AD- | | | | 19 | | |
| | | | | | 14699 | | | | | | |
| 3480-3498 | AcAuUuAuCcUuUgGgUcUTsT | 1187 | AGACfCfCfAAAAGAUfAAAUfGUTsT | 1188 | AD- | | | | 21 | | |
| | | | | | 14709 | | | | | | |
| 3480-3498 | AfcAfuUfuAfuDfuUfuUfgGfgUfcUfTsT | 1189 | AGACCcaAAagAUAAAuguTsT | 1190 | AD- | | | | 24 | | |
| | | | | | 14719 | | | | | | |
| 3480-3498 | ACfAUfUfUfAUfCfUfUfCfUfGGGUfCfUfTs | 1191 | AGACCcaAAagAUAAAuguTsT | 1192 | AD- | | | | 23 | | |
| | T | | | | 14729 | | | | | | |
| 3480-3498 | AcAuUuAuCuUuUgGgUcUTsT | 1193 | AGACCcaAAagAUAAAuguTsT | 1194 | AD- | | | | 24 | | |
| | | | | | 14739 | | | | | | |
| 3480-3498 | GfcCfaUfcUfgCfuGfcCfgGfaGfcCfTsT | 1195 | p-gGfcUfcCfgGfcAfgCfuGfaUfggfcTsT | 1196 | AD- | | | | 74 | | |
| | | | | | 15085 | | | | | | |
| 3480-3498 | GCfCfAUfCfUfGCfUfGCfCfGGAGCfCfTsT | 1197 | GGCfUfCfCfGGCTAGCTAGAUfGGCfTsT | 1198 | AD- | | | | 60 | | |
| | | | | | 15095 | | | | | | |
| 3480-3498 | GcCaUcGgCuGcCgGaGcCTsT | 1199 | p-gGfcUfcCfgGfcAfgCfuGfaUfggfcTsT | 1200 | AD- | | | | 33 | | |
| | | | | | 15105 | | | | | | |
| 3480-3498 | GcCaUcUgCuGuCgGaGcCTsT | 1201 | GGCfUfCfCfGGCfAGCfAGAUfGGCfTsT | 1202 | AD- | | | | 30 | | |
| | | | | | 15115 | | | | | | |
| 3480-3498 | GfcCfaUfcUfgCfuGfcCfgGfaGfcCfTsT | 1203 | GGCUCauGCagCAGAUggcTsT | 1204 | AD- | | | | 54 | | |
| | | | | | 15125 | | | | | | |
| 3480-3498 | GCfCfAUfCfUfGCfUfGCfCfGGAGCfCfTsT | 1205 | GGCGCauGCagCAGAUggcTsT | 1206 | AD- | | | | 51 | | |
| | | | | | 15135 | | | | | | |
| 3480-3498 | GcCaUcUgCuGcCgGaGcCTsT | 1207 | GGCUCauGCagCAGAUggcTsT | 1208 | AD- | | | | 49 | | |
| | | | | | 15145 | | | | | | |
| 3481-3499 | CAUUUAUCUUUUGGGUCUGTsT | 1209 | CAGACCCAAAAGAUAAAUGTsT | 1210 | AD- | 49 | 61 | | | | |
| | | | | | 9578 | | | | | | |
| 3481-3499 | cAuuuAucuuuuGGGuuuGTsT | 1211 | cAGACCcAAAAGAuAAAUGTsT | 1212 | AD- | | 111 | | | | |
| | | | | | 9704 | | | | | | |
| 3485-3403 | UAUCUUUUGGGUCUGUCCUTsT | 1213 | AGGACAGACCCAAAAGAUATsT | 1214 | AD- | | 66 | | | | |
| | | | | | 9558 | | | | | | |
| 3485-3503 | uAucuuuuGGGucuGuccuTsT | 1215 | AGGAcAGACCcAAAAGAuATsT | 1216 | AD- | | 63 | | | | |
| | | | | | 9684 | | | | | | |
| 3504-3522 | CUCUGUUGCCUUUUUACAGTsT | 1217 | CUGUAAAAAGGCAACAGAGTsT | 1218 | AD- | | 29 | 30 | | | |
| | | | | | 9634 | | | | | | |
| 3504-3522 | cucuGuuGccuuuuuuAcAGTsT | 1219 | CUGuAAAAAGGcAAcAGAGTsT | 1220 | AD- | | 14 | 27 | | | |
| | | | | | 9760 | | | | | | |
| 3512-3530 | CCUUUUUACAGCCAACUUUTT | 1221 | AAAGUUGGCUGUAAAAAGGTT | 1222 | AD- | | | | 5 | | |
| | | | | | 15411 | | | | | | |
| 3521-3539 | AGCCAACUUUUCUAGACCUTT | 1223 | AGGUCCAGAAAAGUUGGCUTT | 1224 | AD- | | | | 23 | | |
| | | | | | 15266 | | | | | | |
| 3526-3544 | ACUUUUCUAGACCUGUUUUTT | 1225 | AAAACAGGUCUAGAAAAGUTT | 1226 | AD- | | | | 12 | | |
| | | | | | 15382 | | | | | | |
| 3530-3548 | UUCUAGACCUGUUUUGCUUTsT | 1227 | AAGCAAAACAGGUCUAGAATsT | 1228 | AD- | | 23 | 24 | | | |
| | | | | | 9554 | | | | | | |
| 3530-3548 | uucuAGAccuGuuuuGcuuTsT | 1229 | AAGcAAAACcGGUCuAGAATsT | 1230 | AD- | | 12 | 22 | | 0.10 | 0.10 |
| | | | | | 9680 | | | | | | |
| 3530-3548 | UfuCfuAfgAfcCfuGfuUfuGfgCfuGfTsT | 1231 | p-aAfgCfaafaafcAfgGfuCfuAfgAfaTsT | 1232 | AD- | | | | 12 | | |
| | | | | | 14676 | | | | | | |
| 3530-3548 | UfCfCfUfAGACfCfUfGUfUfUfUfGCfUfUTTs | 1233 | AAGTAAAACfAGGUfCfUfAGAATsT | 1234 | AD- | | | | 13 | | |
| | T | | | | 14686 | | | | | | |
| 3530-3548 | UuCuAgAcCuGcUuUgCuUTsT | 1235 | p-aAfgCfaAfaAfcAfgGfaCfcAfgAfaTsT | 1236 | AD- | | | | 12 | | |
| | | | | | 14696 | | | | | | |
| 3530-3548 | UuCuAgAcCuGuUuUgCuUTsT | 1237 | AAGCfAAAACfAGGUfCfUfAGAATsT | 1238 | AD- | | | | 18 | | |
| | | | | | 14706 | | | | | | |
| 3530-3548 | UfuCfuAfgAfcCfuGfuUfaUfTCfuUTTsT | 1239 | AAGcAaaACagGUCUAgaaTsT | 1240 | AD- | | | | 17 | | |
| | | | | | 14716 | | | | | | |
| 3530-3548 | UfUfCfUfAGACfCfUfGUfUfUfUfGCfUfUTTs | 1241 | AAGcAaaACagGUCUAgaaTsT | 1242 | AD- | | | | 16 | | |
| | T | | | | 14726 | | | | | | |
| 3530-3548 | UuCuAgAcCuGcUuUgCuUTsT | 1243 | AAGcAaaACagGUCUAgaaTsT | 1244 | AD- | | | | 9 | | |
| | | | | | 14736 | | | | | | |
| 3530-3548 | CfaUfaGfgCfcUfgGfaGfcUfaAfuCTTsT | 1245 | p-aAfuAfaAfcUfcCfaFfgCfcUfaUfgTsT | 1246 | AD- | | | | 27 | | |
| | | | | | 15082 | | | | | | |
| 3530-3548 | CfAUfAGGCfCfUfGGAGUfUfUfACfUTTsT | 1247 | AAUfAAACfUfCfCfAGGCfCfUTAUfGTsT | 1248 | AD- | | | | 28 | | |
| | | | | | 15092 | | | | | | |
| 3530-3548 | CaUaGgCcUgGaGuUuAuUTsT | 1249 | p-aAfcAfaAfcUfcCfaGfgCfcUfaCfgTsT | 1250 | AD- | | | | 19 | | |
| | | | | | 15102 | | | | | | |
| 3530-3548 | CaUaGgCcUgGaGuUcAuUTsT | 1251 | AAUfAAACfUfCTCfAGGCfCTUfAUTGTsT | 1252 | AD- | | | | 17 | | |
| | | | | | 15112 | | | | | | |
| 3530-3548 | CfaUfaGfgCfcUfgGfaGfcUfuAfuUfTsT | 1253 | AAUAAacCCcaGGCCUaugTsT | 1254 | AD- | | | | 56 | | |
| | | | | | 15122 | | | | | | |
| 3530-3548 | CfAUfAGGCfCfUfGGAGUfUfUfACfUTTsT | 1255 | AAUAAucUCcaGGCCUaugTsT | 1256 | AD- | | | | 39 | | |
| | | | | | 15132 | | | | | | |
| 3530-3548 | CaUaGgCcUgGaGuUuAuUTsT | 1257 | AAUAAacUCcaGGCCCaugTsT | 1258 | AD- | | | | 46 | | |
| | | | | | 15142 | | | | | | |
| 3531-3549 | UCUAGACCUGUUUUGCUUUTsT | 1259 | AAAGCAAAACAGGUCUAGATsT | 1260 | AD- | | 27 | 22 | | 0.02 | |
| | | | | | 9553 | | | | | | |
| 3531-3549 | ucuAGAccuGuuuuGccuuTsT | 1261 | AAAGcAAAAcAGGUCuAGATsT | 1262 | AD- | | 17 | 21 | | | |
| | | | | | 9679 | | | | | | |
| 3531-3549 | UfcUfaGfaCfcUfgUfuUfuGfcUfuUfTsT | 1263 | p-aAfaGfcAfaAfaCfaGfgUfcUfaGfaTsT | 1264 | AD- | | | | 11 | | |
| | | | | | 14675 | | | | | | |
| 3531-3549 | UfCfUfAGACfCfUfGUfUfGfUfGCfUfUfUfTs | 1265 | AAAGCfAAAACfAGGUfCfUfAGATsT | 1266 | AD- | | | | 19 | | |
| | T | | | | 14685 | | | | | | |
| 3531-3549 | UcUaGaCcUgUuUuGcUuUTsT | 1267 | p-aAfaGfcAfaAfaCfaGfgUfcUfaGfaTsT | 1268 | AD- | | | | 12 | | |
| | | | | | 14695 | | | | | | |
| 3531-3549 | UcUaGaCcUgUuUuGcUuUTsT | 1269 | AAAGCfAAAACfAGGUfCfUfAGATsT | 1270 | AD- | | | | 16 | | |
| | | | | | 14705 | | | | | | |
| 3531-3549 | UfcUfaGfaCfcUfgUfuUfuGfcUfaUfTsT | 1271 | AAAGCaaAAcaGGUCUaGATsT | 1272 | AD- | | | | 19 | | |
| | | | | | 14715 | | | | | | |
| 3531-3549 | UfCfUfAGACfCfUfGUfUfUfUfGCfUfUfUfTs | 1273 | AAAGCaaAAcaGGUCUagaTsT | 1274 | AD- | | | | 19 | | |
| | T | | | | 14725 | | | | | | |
| 3531-3549 | UcUaGaCcUgUuUuGcUuUTsT | 1275 | AAAGCaaAAcuGGUCUagaTsT | 1276 | AD- | | | | 19 | | |
| | | | | | 14735 | | | | | | |
| 3531-3549 | UfcAfuAfgGfccfuGfgAfgUfuUfaUTTsT | 1277 | p-aUfaAfaCfuCfcAfgGfcCfuAfuGfaTsT | 1278 | AD- | | | | 30 | | |
| | | | | | 15081 | | | | | | |
| 3531-3549 | UfCfAUfAGGCfCfUfGGAGUfUfUfAUfTsT | 1279 | AUfAAACfUfCfCfAGGCfCfUfAUfGATsT | 1280 | AD- | | | | 16 | | |
| | | | | | 15091 | | | | | | |
| 3531-3549 | UcAuAgGcCuGgAgUuUaUTsT | 1281 | p-aUfAAfaCfuCfcAfgGfcCfuAgcGfuTsT | 1282 | AD- | | | | 16 | | |
| | | | | | 15101 | | | | | | |
| 3531-3549 | UcAuAgGcCuGgAgUuUaUTsT | 1283 | AUfAAAcFufCfCtAGGCfCfUfAUfGATsT | 1284 | AD- | | | | 11 | | |
| | | | | | 15111 | | | | | | |
| 3531-3549 | UfcAfuAfgGfcCfuGfgAfgUfaUfAUfTsT | 1285 | AUAAAcuCCagGCCUAugaTsT | 1286 | AD- | | | | 19 | | |
| | | | | | 15121 | | | | | | |
| 3531-3549 | UfCfAUfAGGCfCfUfGGAGUfUfUTAUfTsT | 1287 | AUAAAcuCCagGCCUAugaTsT | 1288 | AD- | | | | 17 | | |
| | | | | | 15131 | | | | | | |
| 3531-3549 | UcAuAgGcCuGgAgUuUaUTsT | 1289 | AUAAAcuCCagGCCUAugaTsT | 1290 | AD- | | | | 18 | | |
| | | | | | 15141 | | | | | | |
| 3557-3575 | UGAAGAUAUUUAGUCCGGGTsT | 1291 | CCCAGAAUAAAUAUCUUCATsT | 1292 | AD- | | 97 | 68 | | | |
| | | | | | 9626 | | | | | | |
| 3557-3575 | uGAAGAuAuuuAuuuuGGGTsT | 1293 | CCcAGAAuAAAuAUCUUcATsT | 1294 | AD- | | 28 | 33 | | | |
| | | | | | 9752 | | | | | | |
| 3570-3588 | UCUGGGUUUUGUAGCAGUUTsT | 1295 | AAAUGCUACAAAACCCAGATsT | 1296 | AD- | | 23 | 24 | | | |
| | | | | | 9629 | | | | | | |
| 3570-3588 | ucuGGGuuuuGuAGcAuuuTsT | 1297 | AAAUGCuAcAAAACCcAGATsT | 1298 | AD- | | 28 | 29 | | | |
| | | | | | 9755 | | | | | | |
| 3613-3631 | AUAAAAACAAACAAACGUUTT | 1299 | AACGUUUGUUUGUUUUUAUTT | 1300 | AD- | | | | 21 | | |
| | | | | | 15412 | | | | | | |
| 3677-3635 | AAACAAACAAACGUUGUCCTT | 1301 | GGACAACGUUUGUUUGUUUTT | 1302 | AD- | | | | 73 | | |
| | | | | | 15211 | | | | | | |
| 3618-3636 | AACAAACAAACGUUGUCCUTT | 1303 | AGGACAACGUUGUUUGUUTT | 1304 | AD- | | | | 41 | | |
| | | | | | 15300 | | | | | | |
| ¹U, C, A, G: corresponding ribonucleotide; T: deoxythynidine; u, c, a, g: corresponding 2′-O-methyl ribonucleotide; Uf, Cf, Af, Gf: corresponding 2′-deoxy-2′fluoro ribonucleotide; where nucleotides are written in sequence, they are connected by 3′-5′ phosophodiester groups; nucleotides with interjected “s” are connected by 3′-O-5′-O phosphorothiodiester groups; unless denoted by prefix “p”, | | | | | | | | | | | |
| # oligonucleotides are devoid of a 5′-phosphate group on the 5′-most nucleotide; all oligonucleotides bear 3′-OH on the 3′-most nucleotide | | | | | | | | | | | |

[0193] TABLE 2

| | | | | | |
|---|---|---|---|---|---|
| | | | | | Remaining |
| | | | | | mRNA in % |
| | | | | | of controls |
| | | SEQ | | SEQ | at siRNA |
| Duplex | | ID | Antisense-strand | ID | conc. of 30 |
| number | Sense strand sequence (5′-3′) | NO: | sequence (5′-3′) | NO: | nM |

| AD-10792 | GccuGGAGuuuAuucGGATTsT | 1305 | UUCCAAuAAACUCcAGGCTsT | 1306 | 15 |
|---|---|---|---|---|---|
| AD-10793 | GccuGGAGuuuAuucGGAATsT | 1307 | uUcCGAAuAAACUccAGGCTsT | 1308 | 32 |
| AD-10796 | GccuGGAGuuuAuucGGAATsT | 1309 | UUCCGAAUAAACUCCAGGCTsT | 1310 | 13 |
| AD-12038 | GccuGGAGuuuAuucGGAATsT | 1311 | uUCCGAAUAAACUCCAGGCTsT | 1312 | 13 |
| AD-12039 | GccuGGAGuuuAuucGGAATsT | 1313 | UuCCGAAUAAACUCCAGGCTsT | 1314 | 29 |
| AD-12040 | GccuGGAGuuuAuucGGAATsT | 1315 | UUcCGAAUAAACUCCAGGCTsT | 1316 | 10 |
| AD-12041 | GccuGGAGuuuAuucGGAATsT | 1317 | UUCcGAAUAAACUCCAGGCTsT | 1318 | 11 |
| AD-12042 | GCCUGGAGUUUAUUCGGAATsT | 1319 | uUCCGAAUAAACUCCAGGCTsT | 1320 | 12 |
| AD-12043 | GCCUGGAGUUUAUUCGGAATsT | 1321 | UuCCGAAUAAACUCCAGGCTsT | 1322 | 13 |
| AD-12044 | GCCUGGAGUUUAUUCGGAATsT | 1323 | UUcCGAAUAAACUCCAGGCTsT | 1324 | 7 |
| AD-12045 | GCCUGGAGUUUAUUCGGAATsT | 1325 | UUCcGAAUAAACUCCAGGCTsT | 1326 | 8 |
| AD-12046 | GccuGGAGuuuAuucGGAA | 1327 | UUCCGAAUAAACUCCAGGCscsu | 1328 | 13 |
| AD-12047 | GccuGGAGuuuAuucGGAAA | 1329 | UUUCCGAAUAAACUCCAGGCscsu | 1330 | 17 |
| AD-12048 | GccuGGAGuuuAuucGGAAAA | 1331 | UUUUCCGAAUAAACUCCAGGCscsu | 1332 | 43 |
| AD-12049 | GccuGGAGuuuAuucGGAAAAG | 1333 | CUUUUCCGAAUAAACUCCAGGCscsu | 1334 | 34 |
| AD-12050 | GccuGGAGuuuAuucGGAATTab | 1335 | UUCCGAAUAAACUCCAGGCTTab | 1336 | 16 |
| AD-12051 | GccuGGAGuuuAuucGGAAATTab | 1337 | UUUCCGAAuAAACUCCAGGCTTab | 1338 | 31 |
| AD-12052 | GccuGGAGuuuAuucGGAAAATTab | 1339 | UUUUCCGAAUAAACUCCAGGCTTab | 1340 | 81 |
| AD-12053 | GccuGGAGuuuAuucGGAAAAGTTab | 1341 | CUUUUCCGAAUAAACUCCAGGCTTab | 1342 | 46 |
| AD-12054 | GCCUGGAGUUUAUUCGGAATsT | 1343 | UUCCGAAUAAACUCCAGGCscsu | 1344 | 8 |
| AD-12055 | GccuGGAGuuuAuucGGAATsT | 1345 | UUCCGAAUAAACUCCAGGCscsu | 1346 | 13 |
| AD-12056 | GcCuGgAgUuUaUuCgGaA | 1347 | UUCCGAAUAAACUCCAGGCTTab | 1348 | 11 |
| AD-12057 | GcCuGgAgUuUaUuCgGaA | 1349 | UUCCGAAUAAACUCCAGGCTsT | 1350 | 8 |
| AD-12058 | GcCuGgAgUuUaUuCgGaA | 1351 | UUCCGAAuAAACUCcAGGCTsT | 1352 | 9 |
| AD-12059 | GcCuGgAgUuUaUuCgGaA | 1353 | uUcCGAAuAAACUccAGGCTsT | 1354 | 23 |
| AD-12060 | GcCuGgAgUuUaUuCgGaA | 1355 | UUCCGaaUAaaCUCCAggc | 1356 | 10 |
| AD-12061 | GcCuGgnAgUuUaUuCgGaATsT | 1357 | UUCCGaaUAaaCUCCAggcTsT | 1358 | 7 |
| AD-12062 | GcCuGgAgUuUaUuCgGaATTab | 1359 | UUCCGaaUAaaCUCCAggcTTab | 1360 | 10 |
| AD-12063 | GcCuGgAgUuUaUuCgGaA | 1361 | UUCCGaaUAaaCUCCAggcscsa | 1362 | 19 |
| AD-12064 | GcCuGgnAgUuUaUuCgGaATsT | 1363 | UUCCGAAuAAACUCcAGGCTsT | 1364 | 15 |
| AD-12065 | GcCuGgAgUuUaUuCgGaATTab | 1365 | UUCCGAAuAAACUCcAGGCTTab | 1366 | 16 |
| AD-12066 | GcCuGgAgUuUaUuCgGaA | 1367 | UUCCGAAuAAACUCcAGGCscsu | 1368 | 20 |
| AD-12067 | GcCuGgnAgUuUaUuCgGaATsT | 1369 | UUCCGAAUAAACUCCAGGCTsT | 1370 | 17 |
| AD-12068 | GcCuGgAgUuUaUuCgGaATTab | 1371 | UUCCGAAUAAACUCCAGGCTTab | 1372 | 18 |
| AD-12069 | GcCuGgAgUuUaUuCgGaA | 1373 | UUCCGAAUAAACUCCAGGCscsu | 1374 | 13 |
| AD-12338 | GfcCfuGfgAfgUfuUfaUfuCfgGfaAf | 1375 | P-uUfcCfgAfaUfaAfaCfuCfcAfgGfc | 1376 | 15 |
| AD-12339 | GcCuGgAgUuUaUuCgGaA | 1377 | P-uUfcCfgAfaUfaAfaCfuCfcAfgGfc | 1378 | 14 |
| AD-12340 | GccuGGAGuuuAuucGGAA | 1379 | P-uUfcCfgAfaUfaAfaCfuCfcAfgGfc | 1380 | 19 |
| AD-12341 | GfcCfuGfgAfgUfuUfaUfuCfgGfaAfTsT | 1381 | P-uUfcCfgAfaUfaAfaCfuCfcAfgGfc | 1382 | 12 |
| | | | TsT | | |
| AD-12342 | GfcCfuGfgAfgUfuUfaUfuCfgGfaAfTsT | 1383 | UUCCGAAuAAACUCcAGGCTsT | 1384 | 13 |
| AD-12343 | GfcCfuGfgAfgUfuUfaUfuCfgGfaAfTsT | 1385 | uUcCGAAuAAACUccAGGCTsT | 1386 | 24 |
| AD-12344 | GfcCfuGfgAfgUfuUfaUfuCfgGfaAfTsT | 1387 | UUCCGAAUAAACUCCAGGCTsT | 1388 | 9 |
| AD-12345 | GfcCfuGfgAfgUfuUfaUfuCfgGfaAfTsT | 1389 | UUCCGAAUAAACUCCAGGCscsu | 1390 | 12 |
| AD-12346 | GfcCfuGfgAfgUfuUfaUfuCfgGfaAfTsT | 1391 | UUCCGaaUAaaCUCCAggcscsu | 1392 | 13 |
| AD-12347 | GCCUGGAGUUUAUUCGGAATsT | 1393 | P-uUfcCfgAgaUfaAfaCfuCfcAfgGfc | 1394 | 11 |
| | | | TsT | | |
| AD-12348 | GccuGGAGuuuAuucGGAATsT | 1395 | P-uUfcCfgAgaUfaAfaCfuCfcAfgGfc | 1396 | 8 |
| | | | TsT | | |
| AD-12349 | GcCuGgnAgUuUaUuCgGaATsT | 1397 | P-uUfcCfgAgaUfaAfaCfuCfcAfgGfc | 1398 | 11 |
| | | | TsT | | |
| AD-12350 | GfcCfuGfgAfgUfuUfaUfuCfgGfaAfTTab | 1399 | P-uUfcCfgAgaUfaAfaCfuCfcAfgGfc | 1400 | 17 |
| | | | TTab | | |
| AD-12351 | GfcCfuGfgAfgUfuUfaUfuCfgGfaAf | 1401 | P-uUfcCfgAgaUfaAfaCfuCfcAfgGfcs | 1402 | 11 |
| | | | Cfsu | | |
| AD-12352 | GfcCfuGfgAfgUfuUfaUfuCfgGfaAf | 1403 | UUCCGaaUAaaCUCCAggcscsu | 1404 | 11 |
| AD-12354 | GfcCfuGfgAfgUfuUfaUfuCfgGfaAf | 1405 | UUCCGAAUAAACUCCAGGCscsu | 1406 | 11 |
| AD-12355 | GfcCfuGfgAfgUfuUfaUfuCfgGfaAf | 1407 | UUCCGAAuAAACUCcAGGCTsT | 1408 | 9 |
| AD-12356 | GfcCfuGfgAfgUfuUfaUfuCfgGfaAf | 1409 | uUcCGAAuAAACUccAGGCTsT | 1410 | 25 |
| AD-12357 | GmocCmouGmogAm02gUmouUmoaUmouCmogGmoaA | 1411 | UUCCGaaUAaaCUCCAggc | 1412 | 56 |
| AD-12358 | GmocCmouGmogAm02gUmouUmoaUmouCmogGmoaA | 1413 | P-uUfcCfgAfaUfaAfaCfuCfcAfgGfc | 1414 | 29 |
| AD-12359 | GmocCmouGmogAm02gUmouUmoaUmouCmogGmoaA | 1415 | P-uUfcCfgAfaUfaAfaCfuCfcAfgGfcs | 1416 | 30 |
| | | | Cfsu | | |
| AD-12360 | GmocCmouGmogAm02gUmouUmoaUmouCmogGmoaA | 1417 | UUCCGAAUAAACUCCAGGCscsu | 1418 | 15 |
| AD-12361 | GmocCmouGmogAm02gUmouUmoaUmouCmogGmoaA | 1419 | UUCCGAAuAAACUCcAGGCTsT | 1420 | 20 |
| AD-12362 | GmocCmouGmogAm02gUmouUmoaUmouCmogGmoaA | 1421 | uUcCGAAuAAACUccAGGCTsT | 1422 | 51 |
| AD-12365 | GmocCmouGmogAm02gUmouUmoaUmouCmogGmoaA | 1423 | UUCCGaaUAaaCUCCAggcscsu | 1424 | 11 |
| AD-12364 | GmocCmouGmogAmogUmouUmoaUmonCmogGmonATsT | 1425 | UUCCGaaUAaaCUCCAggcTsT | 1426 | 25 |
| AD-12365 | GmocCmouGmogAmogUmouUmoaUmouCmogGmonATsT | 1427 | UUCCGAAuAAACUCcAGGCTsT | 1428 | 18 |
| AD-12366 | GmocCmouGmogAmogUmouUmoaUmouCmogGmonATsT | 1429 | UUCCGAAUAAACUCCAGGCTsT | 1430 | 23 |
| AD-12367 | GmocmocmouGGAGmoumoumouAmoumoumocGGAATsT | 1431 | UUCCGaaUAaaCUCCAggcTsT | 1432 | 42 |
| AD-12368 | GmocmocmouGGAGmoumoumonAmoumoumocGGAATsT | 1433 | UUCCGAAuAAACUCcAGGCTsT | 1434 | 40 |
| AD-12369 | GmocmocmouGGAGmoumoumouAmoumoumocGGAATsT | 1435 | UUCCGAAUAAACUCCAGGCTsT | 1436 | 26 |
| AD-12370 | GmocmocmouGGAGmoumoumouAmoumoumocGGAATsT | 1437 | P-UfUfCfCfGAAUfAAACfUfCfCfAGGCf | 1438 | 68 |
| | | | TsT | | |
| AD-12371 | GmocmocmouGGAGmoumoumouAmoumoumocGGAATsT | 1439 | P-UfUfCfCfGAAUfAAACfUfCfCfAGGCfs | 1440 | 60 |
| | | | CfsUf | | |
| AD-12372 | GmocmocmouGGAGmoumoumonAmoumoumocGGAATsT | 1441 | P-uUfcCfgAfaUfaAfaCfuCfcAfgGfcs | 1442 | 60 |
| | | | Cfsu | | |
| AD-12373 | GmocmocmouGGAGmoumoumouAmoumoumocGGAATsT | 1443 | UUCCGAAUAAACUCCAGGCTsT | 1444 | 55 |
| AD-12374 | GCfCfUfGGAGUfUfUfAUfUfCfGGAATsT | 1445 | UfUfCfCfGAAUfAAACfUfCfCfAGGCfTsT | 1446 | 9 |
| AD-12375 | GCfCfUfGGAGUfUfUfAUfUfCfGGAATsT | 1447 | UUCCGAAUAAACUCCAGGCTsT | 1448 | 16 |
| AD-12377 | GCfCfUfGGAGUfUfUfAUfUfCfGGAATsT | 1449 | uUcCGAAuAAACUccAGGCTsT | 1450 | 88 |
| AD-12378 | GCfCfUfGGAGUfUfUfAUfUfCfGGAATsT | 1451 | UUCCGaaUAaaCUCCAggcscsu | 1452 | 6 |
| AD-12379 | GCfCfUfGGAGUfUfUfAUfUfCfGGAATsT | 1453 | UUCCGAAUAAACUCCAGGCscsu | 1454 | 6 |
| AD-12380 | GCfCfUfGGAGUfUfUfAUfUfCfGGAATsT | 1455 | P-uUfcCfgAfaUfaAfaCfuCfcAfgGfcs | 1456 | 8 |
| | | | Cfsu | | |
| AD-12381 | GCfCfUfGGAGUfUfUfAUfUfCfGGAATsT | 1457 | P-uUfcCfgAfaUfaAfaCfuCfcAfgGfc | 1458 | 10 |
| | | | TsT | | |
| AD-12382 | GCfCfUfGGAGUfUfUfAUfUfCfGGAATsT | 1459 | P-UfUfCfCfGAAUfAAACfUfCfCfAGGCf | 1460 | 7 |
| | | | TsT | | |
| AD-12383 | GCCUGGAGUUUAUUCGGAATsT | 1461 | P-UfUfCfCfGAAUfAAACfUfCfCfAGGCf | 1462 | 7 |
| | | | TsT | | |
| AD-12384 | GccuGGAGuuuAuucGGAATsT | 1463 | P-UfUfCfCfGAAUfAAACfUfCfCfAGGCf | 1464 | 8 |
| | | | TsT | | |
| AD-12385 | GcCuGgnAgUuUaUuCgGaATsT | 1465 | P-UfUfCfCfGAAUfAAACfUfCfCfAGGCf | 146 | 8 |
| | | | TsT | | |
| AD-12386 | GfcCfuGfgAfgUfuUfaUfuCfuGfaAf | 1467 | P-UfUfCfCfGAAUfAAACfUfCfCfAGGCf | 1468 | 11 |
| | | | TsT | | |
| AD-12387 | GCfCfUfGGAGGUfUfUfAUfUfCfGGAA | 1469 | UfUfCfCfGAAUfAAACfUfCfCfAGGCfs | 1470 | 13 |
| | | | CfsUf | | |
| AD-12388 | GCfCfUfGGAGGUfUfUfAUfUfCfGGAA | 1471 | P-uUfcCfgAfaUfaAfaCfuCgcAfgGfc | 1472 | 19 |
| AD-12389 | GCfCfUfGGAGGUfUfUfAUfUfCfGGAA | 1473 | P-uUfcCfgAfaUfaAfaCfuCgcAfgGfcs | 1474 | 16 |
| | | | Cfsu | | |
| AD-12390 | GCfCfUfGGAGGUfUfUfAUfUfCfGGAA | 1475 | UUCCGAAUAAACUCCAGGCscsu | 1476 | 17 |
| AD-12391 | GCfCfUfGGAGGUfUfUfAUfUfCfGGAA | 1477 | UUCCGaaUAaaCUCCAggc | 1478 | 21 |
| AD-12392 | GCfCfUfGGAGGUfUfUfAUfUfCfGGAA | 1479 | UUCCGAAUAAACUCCAGGCTsT | 1480 | 28 |
| AD-12393 | GCfCfUfGGAGGUfUfUfAUfUfCfGGAA | 1481 | UUCCGAAuAAACUCcAGGCTsT | 1482 | 17 |
| AD-12394 | GCfCfUfGGAGGUfUfUfAUfUfCfGGAA | 1483 | uUcCGAAuAAACUccAGGCTsT | 1484 | 75 |
| AD-12395 | GmocCmouGmogAmogUmouUmoaUmouCmogGmoaATsT | 1485 | P-UfUfCfCfGAAUfAAACfUfCfCfAGGCfs | 1486 | 55 |
| | | | CfsUf | | |
| AD-12396 | GmocCmouGmogAm02gUmouUmoaUmouCmogGmoaA | 1487 | P-UfUfCfCfGAAUfAAACfUfCfCfAGGCfs | 1488 | 59 |
| | | | CfsUf | | |
| AD-12397 | GfcCfuGfgAfgUfuUfaUfuCfgGfaAf | 1489 | P-UfUfCfCfGAAUfAAACfUfCfCfAGGCfs | 1490 | 20 |
| | | | CfsUf | | |
| AD-12398 | GfcCfuGfgAfgUfuUfaUfuCfgGfaAfTsT | 1491 | P-UfUfCfCfGAAUfAAACfUfCfCfAGGCfs | 1492 | 11 |
| | | | CfsUf | | |
| AD-12399 | GcCuGgnAgUuUaUuCgGaATsT | 1493 | P-UfUfCfCfGAAUfAAACfUfCfCfAGGCfs | 1494 | 13 |
| | | | CfsUf | | |
| AD-12400 | GCCUGGAGUUUAUUCGGAATsT | 1495 | P-UfUfCfCfGAAUfAAACfUfCfCfAGGCfs | 1496 | 12 |
| | | | CfsUf | | |
| AD-12401 | GccuGGAGuuuAuucGGAATsT | 1497 | P-UfUfCfCfGAAUfAAACfUfCfCfAGGCfs | 1498 | 13 |
| | | | CfsUf | | |
| AD-12402 | GccuGGAGuuuAuucGGAA | 1499 | P-UfUfCfCfGAAUfAAACfUfCfCfAGGCfs | 1500 | 14 |
| | | | CfsUf | | |
| AD-12403 | GCfCfUfGGAGGUfUfUfAUfUfCfGGAA | 1501 | P-UfUfCfCfGAAUfAAACfUfCfCfAGGCfs | 1502 | 4 |
| | | | CfsUf | | |
| AD-9314 | GCCUGGAGUUUAUUCGGAATsT | 1503 | UUCCGAAUAAACUCCAGGCTsT | 1504 | 9 |
| ¹U, C, A, G: corresponding ribonucleotide; T: deoxythymidine; u, c, a, g: corresponding 2′-O-methyl ribonucleotide; Uf, Cf, Af, Gf: corresponding 2′-deoxy-2′-fluoro ribonucleotide; moc, mou, mog, moa: corresponding 2′-MOE nucleotide; where nucleotides are written in sequence, they are connected by 3′-5′ phosphodiester groups; ab: 3′-terminal abasic nucleotide; nucleotides with interjected “s” are connected by 3′-O-5′-O phosphorothiodiester | | | | | |
| #groups; unless denoted by prefix “p-”, oligonucleotides are devoid of a 5′-phosphate group on the 5′-most nucleotide; all oligonucleotides bear 3′-OH on the 3′-most nucleotide | | | | | |

The application's sequence listing, which the Patent Office published only in electronic form, follows.

SEQUENCE LISTING (1504 sequences)

SEQ ID NO: 1 - DNA, 21 bp, Artificial sequence
  siRNAs to PCSK9
  5'-terminal nucleic acid is a nucleoside, i.e. base + sugar but lacking 5'-phosphate
  modified_base 1..19: /mod_base = "2'-hydroxy corresponding base"
agcgacgucgaggcgcucatt

SEQ ID NO: 2 - DNA, 21 bp, Artificial sequence
  siRNAs to PCSK9
  5'-terminal nucleic acid is a nucleoside, i.e. base + sugar but lacking 5'-phosphate
  modified_base 1..19: /mod_base = "2'-hydroxy corresponding base"
ugagcgccucgacgucgcutt

SEQ ID NO: 3 - DNA, 21 bp, Artificial sequence
  siRNAs to PCSK9
  5'-terminal nucleic acid is a nucleoside, i.e. base + sugar but lacking 5'-phosphate
  modified_base 1..19: /mod_base = "2'-hydroxy corresponding base"
cgcucaugguugcaggcggtt

SEQ ID NO: 4 - DNA, 21 bp, Artificial sequence
  siRNAs to PCSK9
  5'-terminal nucleic acid is a nucleoside, i.e. base + sugar but lacking 5'-phosphate
  modified_base 1..19: /mod_base = "2'-hydroxy corresponding base"
ccgccugcaaccaugagcgtt

SEQ ID NO: 5 - DNA, 21 bp, Artificial sequence
  siRNAs to PCSK9
  5'-terminal nucleic acid is a nucleoside, i.e. base + sugar but lacking 5'-phosphate
  modified_base 1..19: /mod_base = "2'-hydroxy corresponding base"
gcucaugguugcaggcgggtt

SEQ ID NO: 6 - DNA, 21 bp, Artificial sequence
  siRNAs to PCSK9
  5'-terminal nucleic acid is a nucleoside, i.e. base + sugar but lacking 5'-phosphate
  modified_base 1..19: /mod_base = "2'-hydroxy corresponding base"
cccgccugcaaccaugagctt

SEQ ID NO: 7 - DNA, 21 bp, Artificial sequence
  siRNAs to PCSK9
  5'-terminal nucleic acid is a nucleoside, i.e. base + sugar but lacking 5'-phosphate
  modified_base 1..19: /mod_base = "2'-hydroxy corresponding base"
gcgggcgccgccguucagutt

SEQ ID NO: 8 - DNA, 21 bp, Artificial sequence
  siRNAs to PCSK9
  5'-terminal nucleic acid is a nucleoside, i.e. base + sugar but lacking 5'-phosphate
  modified_base 1..19: /mod_base = "2'-hydroxy corresponding base"
acugaacggcggcgcccgctt

SEQ ID NO: 9 - DNA, 21 bp, Artificial sequence
  siRNAs to PCSK9
  5'-terminal nucleic acid is a nucleoside, i.e. base + sugar but lacking 5'-phosphate
  modified_base 1..19: /mod_base = "2'-hydroxy corresponding base"
cgggcgccgccguucaguutt

SEQ ID NO: 10 - DNA, 21 bp, Artificial sequence
  siRNAs to PCSK9
  5'-terminal nucleic acid is a nucleoside, i.e. base + sugar but lacking 5'-phosphate
  modified_base 1..19: /mod_base = "2'-hydroxy corresponding base"
aacugaacggcggcgcccgtt

SEQ ID NO: 11 - DNA, 21 bp, Artificial sequence
  siRNAs to PCSK9
  5'-terminal nucleic acid is a nucleoside, i.e. base + sugar but lacking 5'-phosphate
  modified_base 1..19: /mod_base = "2'-hydroxy corresponding base"
gggcgccgccguucaguuctt

SEQ ID NO: 12 - DNA, 21 bp, Artificial sequence
  siRNAs to PCSK9
  5'-terminal nucleic acid is a nucleoside, i.e. base + sugar but lacking 5'-phosphate
  modified_base 1..19: /mod_base = "2'-hydroxy corresponding base"
gaacugaacggcggcgccctt

SEQ ID NO: 13 - DNA, 21 bp, Artificial sequence
  siRNAs to PCSK9
  5'-terminal nucleic acid is a nucleoside, i.e. base + sugar but lacking 5'-phosphate
  modified_base 1..19: /mod_base = "2'-hydroxy corresponding base"
ccguucaguucagggucugtt

SEQ ID NO: 14 - DNA, 21 bp, Artificial sequence
  siRNAs to PCSK9
  5'-terminal nucleic acid is a nucleoside, i.e. base + sugar but lacking 5'-phosphate
  modified_base 1..19: /mod_base = "2'-hydroxy corresponding base"
cagacccugaacugaacggtt

SEQ ID NO: 15 - DNA, 21 bp, Artificial sequence
  siRNAs to PCSK9
  5'-terminal nucleic acid is a nucleoside, i.e. base + sugar but lacking 5'-phosphate
  modified_base 1..19: /mod_base = "2'-hydroxy corresponding base"
uucaguucagggucugagctt

SEQ ID NO: 16 - DNA, 21 bp, Artificial sequence
  siRNAs to PCSK9
  5'-terminal nucleic acid is a nucleoside, i.e. base + sugar but lacking 5'-phosphate
  modified_base 1..19: /mod_base = "2'-hydroxy corresponding base"
gcucagacccugaacugaatt

SEQ ID NO: 17 - DNA, 21 bp, Artificial sequence
  siRNAs to PCSK9
  5'-terminal nucleic acid is a nucleoside, i.e. base + sugar but lacking 5'-phosphate
  modified_base 1..19: /mod_base = "2'-hydroxy corresponding base"
gugagacuggcucgggcggtt

SEQ ID NO: 18 - DNA, 21 bp, Artificial sequence
  siRNAs to PCSK9
  5'-terminal nucleic acid is a nucleoside, i.e. base + sugar but lacking 5'-phosphate
  modified_base 1..19: /mod_base = "2'-hydroxy corresponding base"
ccgcccgagccagucucactt

SEQ ID NO: 19 - DNA, 21 bp, Artificial sequence
  siRNAs to PCSK9
  5'-terminal nucleic acid is a nucleoside, i.e. base + sugar but lacking 5'-phosphate
  modified_base 1..19: /mod_base = "2'-hydroxy corresponding base"
ggccgggacgcgucguugctt

SEQ ID NO: 20 - DNA, 21 bp, Artificial sequence
  siRNAs to PCSK9
  5'-terminal nucleic acid is a nucleoside, i.e. base + sugar but lacking 5'-phosphate
  modified_base 1..19: /mod_base = "2'-hydroxy corresponding base"
gcaacgacgcgucccggcctt

SEQ ID NO: 21 - DNA, 21 bp, Artificial sequence
  siRNAs to PCSK9
  5'-terminal nucleic acid is a nucleoside, i.e. base + sugar but lacking 5'-phosphate
  modified_base 1..19: /mod_base = "2'-hydroxy corresponding base"
gccgggacgcgucguugcatt

SEQ ID NO: 22 - DNA, 21 bp, Artificial sequence
  siRNAs to PCSK9
  5'-terminal nucleic acid is a nucleoside, i.e. base + sugar but lacking 5'-phosphate
  modified_base 1..19: /mod_base = "2'-hydroxy corresponding base"
ugcaacgacgcgucccggctt

SEQ ID NO: 23 - DNA, 21 bp, Artificial sequence
  siRNAs to PCSK9
  5'-terminal nucleic acid is a nucleoside, i.e. base + sugar but lacking 5'-phosphate
  modified_base 1..19: /mod_base = "2'-hydroxy corresponding base"
ccgggacgcgucguugcagtt

SEQ ID NO: 24 - DNA, 21 bp, Artificial sequence
  siRNAs to PCSK9
  5'-terminal nucleic acid is a nucleoside, i.e. base + sugar but lacking 5'-phosphate
  modified_base 1..19: /mod_base = "2'-hydroxy corresponding base"
cugcaacgacgcgucccggtt

SEQ ID NO: 25 - DNA, 21 bp, Artificial sequence
  siRNAs to PCSK9
  5'-terminal nucleic acid is a nucleoside, i.e. base + sugar but lacking 5'-phosphate
  modified_base 1..19: /mod_base = "2'-hydroxy corresponding base"
ggacgcgucguugcagcagtt

SEQ ID NO: 26 - DNA, 21 bp, Artificial sequence
  siRNAs to PCSK9
  5'-terminal nucleic acid is a nucleoside, i.e. base + sugar but lacking 5'-phosphate
  modified_base 1..19: /mod_base = "2'-hydroxy corresponding base"
cugcugcaacgacgcgucctt

SEQ ID NO: 27 - DNA, 21 bp, Artificial sequence
  siRNAs to PCSK9
  5'-terminal nucleic acid is a nucleoside, i.e. base + sugar but lacking 5'-phosphate
  modified_base 21: /mod_base = "5'-thio thymidine"
  modified_base 1..19: /mod_base = "2'-hydroxy corresponding base"
ucccagccaggauuccgcgtt

SEQ ID NO: 28 - DNA, 21 bp, Artificial sequence
  siRNAs to PCSK9
  5'-terminal nucleic acid is a nucleoside, i.e. base + sugar but lacking 5'-phosphate
  modified_base 21: /mod_base = "5'-thio thymidine"
  modified_base 1..19: /mod_base = "2'-hydroxy corresponding base"
cgcggaauccuggcugggatt

SEQ ID NO: 29 - DNA, 21 bp, Artificial sequence
  siRNAs to PCSK9
  5'-terminal nucleic acid is a nucleoside, i.e. base + sugar but lacking 5'-phosphate
  modified_base 1, 2, 3, 4, 7, 8, 13, 14, 15, 16, 18: /mod_base = "2'-O-methyl corresponding base"
  modified_base 21: /mod_base = "5'-thio thymidine"
  modified_base 5, 6, 9, 10, 11, 12, 17, 19: /mod_base = "2'-hydroxy corresponding base"
ucccagccaggauuccgcgtt

SEQ ID NO: 30 - DNA, 21 bp, Artificial sequence
  siRNAs to PCSK9
  5'-terminal nucleic acid is a nucleoside, i.e. base + sugar but lacking 5'-phosphate
  modified_base 21: /mod_base = "5'-thio thymidine"
  modified_base 1..19: /mod_base = "2'-hydroxy corresponding base"
cgcggaauccuggcugggatt

SEQ ID NO: 31 - DNA, 21 bp, Artificial sequence
  siRNAs to PCSK9
  5'-terminal nucleic acid is a nucleoside, i.e. base + sugar but lacking 5'-phosphate
  modified_base 21: /mod_base = "5'-thio thymidine"
  modified_base 1..19: /mod_base = "2'-hydroxy corresponding base"
cccagccaggauuccgcgctt

SEQ ID NO: 32 - DNA, 21 bp, Artificial sequence
  siRNAs to PCSK9
  5'-terminal nucleic acid is a nucleoside, i.e. base + sugar but lacking 5'-phosphate
  modified_base 21: /mod_base = "5'-thio thymidine"
  modified_base 1..19: /mod_base = "2'-hydroxy corresponding base"
gcgcggaauccuggcugggtt

SEQ ID NO: 33 - DNA, 21 bp, Artificial sequence
  siRNAs to PCSK9
  5'-terminal nucleic acid is a nucleoside, i.e. base + sugar but lacking 5'-phosphate
  modified_base 1, 2, 3, 6, 7, 12, 13, 14, 15, 17, 19: /mod_base = "2'-O-methyl corresponding base"
  modified_base 21: /mod_base = "5'-thio thymidine"
  modified_base 4, 5, 8, 9, 10, 11, 16, 18: /mod_base = "2'-hydroxy corresponding base"
cccagccaggauuccgcgctt

SEQ ID NO: 34 - DNA, 21 bp, Artificial sequence
  siRNAs to PCSK9
  5'-terminal nucleic acid is a nucleoside, i.e. base + sugar but lacking 5'-phosphate
  modified_base 21: /mod_base = "5'-thio thymidine"
  modified_base 1..19: /mod_base = "2'-hydroxy corresponding base"
gcgcggaauccuggcugggtt

SEQ ID NO: 35 - DNA, 21 bp, Artificial sequence
  siRNAs to PCSK9
  5'-terminal nucleic acid is a nucleoside, i.e. base + sugar but lacking 5'-phosphate
  modified_base 21: /mod_base = "5'-thio thymidine"
  modified_base 1..19: /mod_base = "2'-hydroxy corresponding base"
cagccaggauuccgcgcgctt

SEQ ID NO: 36 - DNA, 21 bp, Artificial sequence
  siRNAs to PCSK9
  5'-terminal nucleic acid is a nucleoside, i.e. base + sugar but lacking 5'-phosphate
  modified_base 21: /mod_base = "5'-thio thymidine"
  modified_base 1..19: /mod_base = "2'-hydroxy corresponding base"
gcgcgcggaauccuggcugtt

SEQ ID NO: 37 - DNA, 21 bp, Artificial sequence
  siRNAs to PCSK9
  5'-terminal nucleic acid is a nucleoside, i.e. base + sugar but lacking 5'-phosphate
  modified_base 1, 4, 5, 10, 11, 12, 13, 15, 17, 19: /mod_base = "2'-O-methyl corresponding base"
  modified_base 21: /mod_base = "5'-thio thymidine"
  modified_base 2, 3, 6, 7, 8, 9, 14, 16, 18: /mod_base = "2'-hydroxy corresponding base"
cagccaggauuccgcgcgctt

SEQ ID NO: 38 - DNA, 21 bp, Artificial sequence
  siRNAs to PCSK9
  5'-terminal nucleic acid is a nucleoside, i.e. base + sugar but lacking 5'-phosphate
  modified_base 21: /mod_base = "5'-thio thymidine"
  modified_base 1..19: /mod_base = "2'-hydroxy corresponding base"
gcgcgcggaauccuggcugtt

SEQ ID NO: 39 - DNA, 21 bp, Artificial sequence
  siRNAs to PCSK9
  5'-terminal nucleic acid is a nucleoside, i.e. base + sugar but lacking 5'-phosphate
  modified_base 21: /mod_base = "5'-thio thymidine"
  modified_base 1..19: /mod_base = "2'-hydroxy corresponding base"
agcuccugcacaguccucctt

SEQ ID NO: 40 - DNA, 21 bp, Artificial sequence
  siRNAs to PCSK9
  5'-terminal nucleic acid is a nucleoside, i.e. base + sugar but lacking 5'-phosphate
  modified_base 21: /mod_base = "5'-thio thymidine"
  modified_base 1..19: /mod_base = "2'-hydroxy corresponding base"
ggaggacugugcaggagcutt

SEQ ID NO: 41 - DNA, 21 bp, Artificial sequence
  siRNAs to PCSK9
  5'-terminal nucleic acid is a nucleoside, i.e. base + sugar but lacking 5'-phosphate
  modified_base 3, 4, 5, 6, 7, 9, 11, 14, 15, 16, 17, 18, 19: /mod_base = "2'-O-methyl corresponding base"
  modified_base 21: /mod_base = "5'-thio thymidine"
  modified_base 1, 2, 8, 10, 12, 13: /mod_base = "2'-hydroxy corresponding base"
agcuccugcacaguccucctt

SEQ ID NO: 42 - DNA, 21 bp, Artificial sequence
  siRNAs to PCSK9
  5'-terminal nucleic acid is a nucleoside, i.e. base + sugar but lacking 5'-phosphate
  modified_base 12: /mod_base = "2'-O-methyl corresponding base"
  modified_base 21: /mod_base = "5'-thio thymidine"
  modified_base 1, 2, 3, 4, 5, 6, 7, 8, 9, 10, 11, 13, 14, 15, 16, 17, 18, 19: /mod_base = "2'-hydroxy corresponding base"
ggaggacugugcaggagcutt

SEQ ID NO: 43 - DNA, 21 bp, Artificial sequence
  siRNAs to PCSK9
  5'-terminal nucleic acid is a nucleoside, i.e. base + sugar but lacking 5'-phosphate
  modified_base 1..19: /mod_base = "2'-hydroxy corresponding base"
caccgcaaggcucaaggcgtt

SEQ ID NO: 44 - DNA, 21 bp, Artificial sequence
  siRNAs to PCSK9
  5'-terminal nucleic acid is a nucleoside, i.e. base + sugar but lacking 5'-phosphate
  modified_base 1..19: /mod_base = "2'-hydroxy corresponding base"
cgccuugagccuugcggugtt

SEQ ID NO: 45 - DNA, 21 bp, Artificial sequence
  siRNAs to PCSK9
  5'-terminal nucleic acid is a nucleoside, i.e. base + sugar but lacking 5'-phosphate
  modified_base 1..19: /mod_base = "2'-hydroxy corresponding base"
cgcaaggcucaaggcgccgtt

SEQ ID NO: 46 - DNA, 21 bp, Artificial sequence
  siRNAs to PCSK9
  5'-terminal nucleic acid is a nucleoside, i.e. base + sugar but lacking 5'-phosphate
  modified_base 1..19: /mod_base = "2'-hydroxy corresponding base"
cggcgccuugagccuugcgtt

SEQ ID NO: 47 - DNA, 21 bp, Artificial sequence
  siRNAs to PCSK9
  5'-terminal nucleic acid is a nucleoside, i.e. base + sugar but lacking 5'-phosphate
  modified_base 1..19: /mod_base = "2'-hydroxy corresponding base"
caaggcucaaggcgccgcctt

SEQ ID NO: 48 - DNA, 21 bp, Artificial sequence
  siRNAs to PCSK9
  5'-terminal nucleic acid is a nucleoside, i.e. base + sugar but lacking 5'-phosphate
  modified_base 1..19: /mod_base = "2'-hydroxy corresponding base"
ggcggcgccuugagccuugtt

SEQ ID NO: 49 - DNA, 21 bp, Artificial sequence
  siRNAs to PCSK9
  5'-terminal nucleic acid is a nucleoside, i.e. base + sugar but lacking 5'-phosphate
  modified_base 1..19: /mod_base = "2'-hydroxy corresponding base"
guggaccgcgcacggccuctt

SEQ ID NO: 50 - DNA, 21 bp, Artificial sequence
  siRNAs to PCSK9
  5'-terminal nucleic acid is a nucleoside, i.e. base + sugar but lacking 5'-phosphate
  modified_base 1..19: /mod_base = "2'-hydroxy corresponding base"
gaggccgugcgcgguccactt

SEQ ID NO: 51 - DNA, 21 bp, Artificial sequence
  siRNAs to PCSK9
  5'-terminal nucleic acid is a nucleoside, i.e. base + sugar but lacking 5'-phosphate
  modified_base 1..19: /mod_base = "2'-hydroxy corresponding base"
uggaccgcgcacggccucutt

SEQ ID NO: 52 - DNA, 21 bp, Artificial sequence
  siRNAs to PCSK9
  5'-terminal nucleic acid is a nucleoside, i.e. base + sugar but lacking 5'-phosphate
  modified_base 1..19: /mod_base = "2'-hydroxy corresponding base"
agaggccgugcgcgguccatt

SEQ ID NO: 53 - DNA, 21 bp, Artificial sequence
  siRNAs to PCSK9
  5'-terminal nucleic acid is a nucleoside, i.e. base + sugar but lacking 5'-phosphate
  modified_base 1..19: /mod_base = "2'-hydroxy corresponding base"
ggaccgcgcacggccucuatt

SEQ ID NO: 54 - DNA, 21 bp, Artificial sequence
  siRNAs to PCSK9
  5'-terminal nucleic acid is a nucleoside, i.e. base + sugar but lacking 5'-phosphate
  modified_base 1..19: /mod_base = "2'-hydroxy corresponding base"
uagaggccgugcgcggucctt

SEQ ID NO: 55 - DNA, 21 bp, Artificial sequence
  siRNAs to PCSK9
  5'-terminal nucleic acid is a nucleoside, i.e. base + sugar but lacking 5'-phosphate
  modified_base 1..19: /mod_base = "2'-hydroxy corresponding base"
gaccgcgcacggccucuagtt

SEQ ID NO: 56 - DNA, 21 bp, Artificial sequence
  siRNAs to PCSK9
  5'-terminal nucleic acid is a nucleoside, i.e. base + sugar but lacking 5'-phosphate
  modified_base 1..19: /mod_base = "2'-hydroxy corresponding base"
cuagaggccgugcgcgguctt

SEQ ID NO: 57 - DNA, 21 bp, Artificial sequence
  siRNAs to PCSK9
  5'-terminal nucleic acid is a nucleoside, i.e. base + sugar but lacking 5'-phosphate
  modified_base 1..19: /mod_base = "2'-hydroxy corresponding base"
accgcgcacggccucuaggtt

SEQ ID NO: 58 - DNA, 21 bp, Artificial sequence
  siRNAs to PCSK9
  5'-terminal nucleic acid is a nucleoside, i.e. base + sugar but lacking 5'-phosphate
  modified_base 1..19: /mod_base = "2'-hydroxy corresponding base"
ccuagaggccgugcgcggutt

SEQ ID NO: 59 - DNA, 21 bp, Artificial sequence
  siRNAs to PCSK9
  5'-terminal nucleic acid is a nucleoside, i.e. base + sugar but lacking 5'-phosphate
  modified_base 1..19: /mod_base = "2'-hydroxy corresponding base"
ccgcgcacggccucuaggutt

SEQ ID NO: 60 - DNA, 21 bp, Artificial sequence
  siRNAs to PCSK9
  5'-terminal nucleic acid is a nucleoside, i.e. base + sugar but lacking 5'-phosphate
  modified_base 1..19: /mod_base = "2'-hydroxy corresponding base"
accuagaggccgugcgcggtt

SEQ ID NO: 61 - DNA, 21 bp, Artificial sequence
  siRNAs to PCSK9
  5'-terminal nucleic acid is a nucleoside, i.e. base + sugar but lacking 5'-phosphate
  modified_base 1..19: /mod_base = "2'-hydroxy corresponding base"
cgcgcacggccucuagguctt

SEQ ID NO: 62 - DNA, 21 bp, Artificial sequence
  siRNAs to PCSK9
  5'-terminal nucleic acid is a nucleoside, i.e. base + sugar but lacking 5'-phosphate
  modified_base 1..19: /mod_base = "2'-hydroxy corresponding base"
gaccuagaggccgugcgcgtt

SEQ ID NO: 63 - DNA, 21 bp, Artificial sequence
  siRNAs to PCSK9
  5'-terminal nucleic acid is a nucleoside, i.e. base + sugar but lacking 5'-phosphate
  modified_base 1..19: /mod_base = "2'-hydroxy corresponding base"
gcgcacggccucuaggucutt

SEQ ID NO: 64 - DNA, 21 bp, Artificial sequence
  siRNAs to PCSK9
  5'-terminal nucleic acid is a nucleoside, i.e. base + sugar but lacking 5'-phosphate
  modified_base 1..19: /mod_base = "2'-hydroxy corresponding base"
agaccuagaggccgugcgctt

SEQ ID NO: 65 - DNA, 21 bp, Artificial sequence
  siRNAs to PCSK9
  5'-terminal nucleic acid is a nucleoside, i.e. base + sugar but lacking 5'-phosphate
  modified_base 1..19: /mod_base = "2'-hydroxy corresponding base"
cgcacggccucuaggucuctt

SEQ ID NO: 66 - DNA, 21 bp, Artificial sequence
  siRNAs to PCSK9
  5'-terminal nucleic acid is a nucleoside, i.e. base + sugar but lacking 5'-phosphate
  modified_base 1..19: /mod_base = "2'-hydroxy corresponding base"
gagaccuagaggccgugcgtt

SEQ ID NO: 67 - DNA, 21 bp, Artificial sequence
  siRNAs to PCSK9
  5'-terminal nucleic acid is a nucleoside, i.e. base + sugar but lacking 5'-phosphate
  modified_base 1..19: /mod_base = "2'-hydroxy corresponding base"
cucuaggucuccucgccagtt

SEQ ID NO: 68 - DNA, 21 bp, Artificial sequence
  siRNAs to PCSK9
  5'-terminal nucleic acid is a nucleoside, i.e. base + sugar but lacking 5'-phosphate
  modified_base 1..19: /mod_base = "2'-hydroxy corresponding base"
cuggcgaggagaccuagagtt

SEQ ID NO: 69 - DNA, 21 bp, Artificial sequence
  siRNAs to PCSK9
  5'-terminal nucleic acid is a nucleoside, i.e. base + sugar but lacking 5'-phosphate
  modified_base 1..19: /mod_base = "2'-hydroxy corresponding base"
ucuaggucuccucgccaggtt

SEQ ID NO: 70 - DNA, 21 bp, Artificial sequence
  siRNAs to PCSK9
  5'-terminal nucleic acid is a nucleoside, i.e. base + sugar but lacking 5'-phosphate
  modified_base 1..19: /mod_base = "2'-hydroxy corresponding base"
ccuggcgaggagaccuagatt

SEQ ID NO: 71 - DNA, 21 bp, Artificial sequence
  siRNAs to PCSK9
  5'-terminal nucleic acid is a nucleoside, i.e. base + sugar but lacking 5'-phosphate
  modified_base 1..19: /mod_base = "2'-hydroxy corresponding base"
cuaggucuccucgccaggatt

SEQ ID NO: 72 - DNA, 21 bp, Artificial sequence
  siRNAs to PCSK9
  5'-terminal nucleic acid is a nucleoside, i.e. base + sugar but lacking 5'-phosphate
  modified_base 1..19: /mod_base = "2'-hydroxy corresponding base"
uccuggcgaggagaccuagtt

SEQ ID NO: 73 - DNA, 21 bp, Artificial sequence
  siRNAs to PCSK9
  5'-terminal nucleic acid is a nucleoside, i.e. base + sugar but lacking 5'-phosphate
  modified_base 1..19: /mod_base = "2'-hydroxy corresponding base"
aggucuccucgccaggacatt

SEQ ID NO: 74 - DNA, 21 bp, Artificial sequence
  siRNAs to PCSK9
  5'-terminal nucleic acid is a nucleoside, i.e. base + sugar but lacking 5'-phosphate
  modified_base 1..19: /mod_base = "2'-hydroxy corresponding base"
uguccuggcgaggagaccutt

SEQ ID NO: 75 - DNA, 21 bp, Artificial sequence
  siRNAs to PCSK9
  5'-terminal nucleic acid is a nucleoside, i.e. base + sugar but lacking 5'-phosphate
  modified_base 1..19: /mod_base = "2'-hydroxy corresponding base"
ccucgccaggacagcaacctt

SEQ ID NO: 76 - DNA, 21 bp, Artificial sequence
  siRNAs to PCSK9
  5'-terminal nucleic acid is a nucleoside, i.e. base + sugar but lacking 5'-phosphate
  modified_base 1..19: /mod_base = "2'-hydroxy corresponding base"
gguugcuguccuggcgaggtt

SEQ ID NO: 77 - DNA, 21 bp, Artificial sequence
  siRNAs to PCSK9
  5'-terminal nucleic acid is a nucleoside, i.e. base + sugar but lacking 5'-phosphate
  modified_base 21: /mod_base = "5'-thio thymidine"
  modified_base 1..19: /mod_base = "2'-hydroxy corresponding base"
cgucagcuccaggcggucctt

SEQ ID NO: 78 - DNA, 21 bp, Artificial sequence
  siRNAs to PCSK9
  5'-terminal nucleic acid is a nucleoside, i.e. base + sugar but lacking 5'-phosphate
  modified_base 21: /mod_base = "5'-thio thymidine"
  modified_base 1..19: /mod_base = "2'-hydroxy corresponding base"
ggaccgccuggagcugacgtt

SEQ ID NO: 79 - DNA, 21 bp, Artificial sequence
  siRNAs to PCSK9
  5'-terminal nucleic acid is a nucleoside, i.e. base + sugar but lacking 5'-phosphate
  modified_base 1, 3, 4, 7, 8, 9, 10, 14, 17, 18, 19: /mod_base = "2'-O-methyl corresponding base"
  modified_base 21: /mod_base = "5'-thio thymidine"
  modified_base 2, 5, 6, 11, 12, 13, 15, 16: /mod_base = "2'-hydroxy corresponding base"
cgucagcuccaggcggucctt

SEQ ID NO: 80 - DNA, 21 bp, Artificial sequence
  siRNAs to PCSK9
  5'-terminal nucleic acid is a nucleoside, i.e. base + sugar but lacking 5'-phosphate
  modified_base 21: /mod_base = "5'-thio thymidine"
  modified_base 1..19: /mod_base = "2'-hydroxy corresponding base"
ggaccgccuggagcugacgtt

SEQ ID NO: 81 - DNA, 21 bp, Artificial sequence
  siRNAs to PCSK9
  5'-terminal nucleic acid is a nucleoside, i.e. base + sugar but lacking 5'-phosphate
  modified_base 21: /mod_base = "5'-thio thymidine"
  modified_base 1..19: /mod_base = "2'-hydroxy corresponding base"
gucagcuccaggcgguccutt

SEQ ID NO: 82 - DNA, 21 bp, Artificial sequence
  siRNAs to PCSK9
  5'-terminal nucleic acid is a nucleoside, i.e. base + sugar but lacking 5'-phosphate
  modified_base 21: /mod_base = "5'-thio thymidine"
  modified_base 1..19: /mod_base = "2'-hydroxy corresponding base"
aggaccgccuggagcugactt

SEQ ID NO: 83 - DNA, 21 bp, Artificial sequence
  siRNAs to PCSK9
  5'-terminal nucleic acid is a nucleoside, i.e. base + sugar but lacking 5'-phosphate
  modified_base 2, 3, 6, 7, 8, 9, 13, 16, 17, 18, 19: /mod_base = "2'-O-methyl corresponding base"
  modified_base 21: /mod_base = "5'-thio thymidine"
  modified_base 1, 4, 5, 10, 11, 12, 14, 15: /mod_base = "2'-hydroxy corresponding base"
gucagcuccaggcgguccutt

SEQ ID NO: 84 - DNA, 21 bp, Artificial sequence
  siRNAs to PCSK9
  5'-terminal nucleic acid is a nucleoside, i.e. base + sugar but lacking 5'-phosphate
  modified_base 21: /mod_base = "5'-thio thymidine"
  modified_base 1..19: /mod_base = "2'-hydroxy corresponding base"
aggaccgccuggagcugactt

SEQ ID NO: 85 - DNA, 21 bp, Artificial sequence
  siRNAs to PCSK9
  5'-terminal nucleic acid is a nucleoside, i.e. base + sugar but lacking 5'-phosphate
  modified_base 1..19: /mod_base = "2'-hydroxy corresponding base"
ggcgcccgugcgcaggaggtt

SEQ ID NO: 86 - DNA, 21 bp, Artificial sequence
  siRNAs to PCSK9
  5'-terminal nucleic acid is a nucleoside, i.e. base + sugar but lacking 5'-phosphate
  modified_base 1..19: /mod_base = "2'-hydroxy corresponding base"
ccuccugcgcacgggcgcctt

SEQ ID NO: 87 - DNA, 21 bp, Artificial sequence
  siRNAs to PCSK9
  5'-terminal nucleic acid is a nucleoside, i.e. base + sugar but lacking 5'-phosphate
  modified_base 21: /mod_base = "5'-thio thymidine"
  modified_base 1..19: /mod_base = "2'-hydroxy corresponding base"
ggagcuggugcuagccuugtt

SEQ ID NO: 88 - DNA, 21 bp, Artificial sequence
  siRNAs to PCSK9
  5'-terminal nucleic acid is a nucleoside, i.e. base + sugar but lacking 5'-phosphate
  modified_base 21: /mod_base = "5'-thio thymidine"
  modified_base 1..19: /mod_base = "2'-hydroxy corresponding base"
caaggcuagcaccagcucctt

SEQ ID NO: 89 - DNA, 21 bp, Artificial sequence
  siRNAs to PCSK9
  5'-terminal nucleic acid is a nucleoside, i.e. base + sugar but lacking 5'-phosphate
  modified_base 5, 6, 9, 11, 12, 15, 16, 17, 18: /mod_base = "2'-O-methyl corresponding base"
  modified_base 21: /mod_base = "5'-thio thymidine"
  modified_base 1, 2, 3, 4, 7, 8, 10, 13, 14, 19: /mod_base = "2'-hydroxy corresponding base"
ggagcuggugcuagccuugtt

SEQ ID NO: 90 - DNA, 21 bp, Artificial sequence
  siRNAs to PCSK9
  5'-terminal nucleic acid is a nucleoside, i.e. base + sugar but lacking 5'-phosphate
  modified_base 1, 7, 10, 13: /mod_base = "2'-O-methyl corresponding base"
  modified_base 21: /mod_base = "5'-thio thymidine"
  modified_base 2, 3, 4, 5, 6, 8, 9, 11, 12, 14, 15, 16, 17, 18, 19: /mod_base = "2'-hydroxy corresponding base"
caaggcuagcaccagcucctt

SEQ ID NO: 91 - DNA, 21 bp, Artificial sequence
  siRNAs to PCSK9
  5'-terminal nucleic acid is a nucleoside, i.e. base + sugar but lacking 5'-phosphate
  modified_base 21: /mod_base = "5'-thio thymidine"
  modified_base 1..19: /mod_base = "2'-hydroxy corresponding base"
gcuggugcuagccuugcgutt

SEQ ID NO: 92 - DNA, 21 bp, Artificial sequence
  siRNAs to PCSK9
  5'-terminal nucleic acid is a nucleoside, i.e. base + sugar but lacking 5'-phosphate
  modified_base 21: /mod_base = "5'-thio thymidine"
  modified_base 1..19: /mod_base = "2'-hydroxy corresponding base"
acgcaaggcuagcaccagctt

SEQ ID NO: 93 - DNA, 21 bp, Artificial sequence
  siRNAs to PCSK9
  5'-terminal nucleic acid is a nucleoside, i.e. base + sugar but lacking 5'-phosphate
  modified_base 2, 3, 6, 8, 9, 12, 13, 14, 15, 17, 19: /mod_base = "2'-O-methyl corresponding base"
  modified_base 21: /mod_base = "5'-thio thymidine"
  modified_base 1, 4, 5, 7, 10, 11, 16, 18: /mod_base = "2'-hydroxy corresponding base"
gcuggugcuagccuugcgutt

SEQ ID NO: 94 - DNA, 21 bp, Artificial sequence
  siRNAs to PCSK9
  5'-terminal nucleic acid is a nucleoside, i.e. base + sugar but lacking 5'-phosphate
  modified_base 4, 10, 13, 16: /mod_base = "2'-O-methyl corresponding base"
  modified_base 21: /mod_base = "5'-thio thymidine"
  modified_base 1, 2, 3, 5, 6, 7, 8, 9, 11, 12, 14, 15, 17, 18, 19: /mod_base = "2'-hydroxy corresponding base"
acgcaaggcuagcaccagctt

SEQ ID NO: 95 - DNA, 21 bp, Artificial sequence
  siRNAs to PCSK9
  5'-terminal nucleic acid is a nucleoside, i.e. base + sugar but lacking 5'-phosphate
  modified_base 21: /mod_base = "5'-thio thymidine"
  modified_base 1..19: /mod_base = "2'-hydroxy corresponding base"
cuggugcuagccuugcguutt

SEQ ID NO: 96 - DNA, 21 bp, Artificial sequence
  siRNAs to PCSK9
  5'-terminal nucleic acid is a nucleoside, i.e. base + sugar but lacking 5'-phosphate
  modified_base 21: /mod_base = "5'-thio thymidine"
  modified_base 1..19: /mod_base = "2'-hydroxy corresponding base"
aacgcaaggcuagcaccagtt

SEQ ID NO: 97 - DNA, 21 bp, Artificial sequence
  siRNAs to PCSK9
  5'-terminal nucleic acid is a nucleoside, i.e. base + sugar but lacking 5'-phosphate
  modified_base 21: /mod_base = "5'-thio thymidine"
  modified_base 1..19: /mod_base = "2'-hydroxy corresponding base"
cuggugcuagccuugcguutt

SEQ ID NO: 98 - DNA, 21 bp, Artificial sequence
  siRNAs to PCSK9
  5'-terminal nucleic acid is a nucleoside, i.e. base + sugar but lacking 5'-phosphate
  modified_base 21: /mod_base = "5'-thio thymidine"
  modified_base 1..19: /mod_base = "2'-hydroxy corresponding base"
aacgcaaggcuagcaccagtt

SEQ ID NO: 99 - DNA, 21 bp, Artificial sequence
  siRNAs to PCSK9
  5'-terminal nucleic acid is a nucleoside, i.e. base + sugar but lacking 5'-phosphate
  modified_base 1, 2, 5, 7, 8, 11, 12, 13, 14, 16, 18, 19: /mod_base = "2'-O-methyl corresponding base"
  modified_base 21: /mod_base = "5'-thio thymidine"
  modified_base 3, 4, 6, 9, 10, 15, 17: /mod_base = "2'-hydroxy corresponding base"
cuggugcuagccuugcguutt

SEQ ID NO: 100 - DNA, 21 bp, Artificial sequence
  siRNAs to PCSK9
  5'-terminal nucleic acid is a nucleoside, i.e. base + sugar but lacking 5'-phosphate
  modified_base 5, 11, 14, 17: /mod_base = "2'-O-methyl corresponding base"
  modified_base 21: /mod_base = "5'-thio thymidine"
  modified_base 1, 2, 3, 4, 6, 7, 8, 9, 10, 12, 13, 15, 16, 18, 19: /mod_base = "2'-hydroxy corresponding base"
aacgcaaggcuagcaccagtt

SEQ ID NO: 101 - DNA, 21 bp, Artificial sequence
  siRNAs to PCSK9
  5'-terminal nucleic acid is a nucleoside, i.e. base + sugar but lacking 5'-phosphate
  modified_base 21: /mod_base = "5'-thio thymidine"
  modified_base 1..19: /mod_base = "2'-hydroxy corresponding base"
ugcuagccuugcguuccgatt

SEQ ID NO: 102 - DNA, 21 bp, Artificial sequence
  siRNAs to PCSK9
  5'-terminal nucleic acid is a nucleoside, i.e. base + sugar but lacking 5'-phosphate
  modified_base 21: /mod_base = "5'-thio thymidine"
  modified_base 1..19: /mod_base = "2'-hydroxy corresponding base"
ucggaacgcaaggcuagcatt

SEQ ID NO: 103 - DNA, 21 bp, Artificial sequence
  siRNAs to PCSK9
  5'-terminal nucleic acid is a nucleoside, i.e. base + sugar but lacking 5'-phosphate
  modified_base 1, 3, 4, 7, 8, 9, 10, 12, 14, 15, 16, 17: /mod_base = "2'-O-methyl corresponding base"
  modified_base 21: /mod_base = "5'-thio thymidine"
  modified_base 2, 5, 6, 11, 13, 18, 19: /mod_base = "2'-hydroxy corresponding base"
ugcuagccuugcguuccgatt

SEQ ID NO: 104 - DNA, 21 bp, Artificial sequence
  siRNAs to PCSK9
  5'-terminal nucleic acid is a nucleoside, i.e. base + sugar but lacking 5'-phosphate
  modified_base 9, 15, 18: /mod_base = "2'-O-methyl corresponding base"
  modified_base 21: /mod_base = "5'-thio thymidine"
  modified_base 1, 2, 3, 4, 5, 6, 7, 8, 10, 11, 12, 13, 14, 16, 17, 19: /mod_base = "2'-hydroxy corresponding base"
ucggaacgcaaggcuagcatt

SEQ ID NO: 105 - DNA, 21 bp, Artificial sequence
  siRNAs to PCSK9
  5'-terminal nucleic acid is a nucleoside, i.e. base + sugar but lacking 5'-phosphate
  modified_base 21: /mod_base = "5'-thio thymidine"
  modified_base 1..19: /mod_base = "2'-hydroxy corresponding base"
uagccuugcguuccgaggatt

SEQ ID NO: 106 - DNA, 21 bp, Artificial sequence
  siRNAs to PCSK9
  5'-terminal nucleic acid is a nucleoside, i.e. base + sugar but lacking 5'-phosphate
  modified_base 21: /mod_base = "5'-thio thymidine"
  modified_base 1..19: /mod_base = "2'-hydroxy corresponding base"
uccucggaacgcaaggcuatt

SEQ ID NO: 107 - DNA, 21 bp, Artificial sequence
  siRNAs to PCSK9
  5'-terminal nucleic acid is a nucleoside, i.e. base + sugar but lacking 5'-phosphate
  modified_base 1, 4, 5, 6, 7, 9, 11, 12, 13, 14: /mod_base = "2'-O-methyl corresponding base"
  modified_base 21: /mod_base = "5'-thio thymidine"
  modified_base 2, 3, 8, 10, 15, 16, 17, 18, 19: /mod_base = "2'-hydroxy corresponding base"
uagccuugcguuccgaggatt

SEQ ID NO: 108 - DNA, 21 bp, Artificial sequence
  siRNAs to PCSK9
  5'-terminal nucleic acid is a nucleoside, i.e. base + sugar but lacking 5'-phosphate
  modified_base 12, 18: /mod_base = "2'-O-methyl corresponding base"
  modified_base 21: /mod_base = "5'-thio thymidine"
  modified_base 1, 2, 3, 4, 5, 6, 7, 8, 9, 10, 11, 13, 14, 15, 16, 17, 19: /mod_base = "2'-hydroxy corresponding base"
uccucggaacgcaaggcuatt

SEQ ID NO: 109 - DNA, 21 bp, Artificial sequence
  siRNAs to PCSK9
  5'-terminal nucleic acid is a nucleoside, i.e. base + sugar but lacking 5'-phosphate
  modified_base 1..19: /mod_base = "2'-hydroxy corresponding base"
gacggccuggccgaagcactt

SEQ ID NO: 110 - DNA, 21 bp, Artificial sequence
  siRNAs to PCSK9
  5'-terminal nucleic acid is a nucleoside, i.e. base + sugar but lacking 5'-phosphate
  modified_base 1..19: /mod_base = "2'-hydroxy corresponding base"
gugcuucggccaggccguctt

SEQ ID NO: 111 - DNA, 21 bp, Artificial sequence
  siRNAs to PCSK9
  5'-terminal nucleic acid is a nucleoside, i.e. base + sugar but lacking 5'-phosphate
  modified_base 1..19: /mod_base = "2'-hydroxy corresponding base"
ggccgaagcacccgagcactt

SEQ ID NO: 112 - DNA, 21 bp, Artificial sequence
  siRNAs to PCSK9
  5'-terminal nucleic acid is a nucleoside, i.e. base + sugar but lacking 5'-phosphate
  modified_base 1..19: /mod_base = "2'-hydroxy corresponding base"
gugcucgggugcuucggcctt

SEQ ID NO: 113 - DNA, 21 bp, Artificial sequence
  siRNAs to PCSK9
  5'-terminal nucleic acid is a nucleoside, i.e. base + sugar but lacking 5'-phosphate
  modified_base 1..19: /mod_base = "2'-hydroxy corresponding base"
gccgaagcacccgagcacgtt

SEQ ID NO: 114 - DNA, 21 bp, Artificial sequence
  siRNAs to PCSK9
  5'-terminal nucleic acid is a nucleoside, i.e. base + sugar but lacking 5'-phosphate
  modified_base 1..19: /mod_base = "2'-hydroxy corresponding base"
cgugcucgggugcuucggctt

SEQ ID NO: 115 - DNA, 21 bp, Artificial sequence
  siRNAs to PCSK9
  5'-terminal nucleic acid is a nucleoside, i.e. base + sugar but lacking 5'-phosphate
  modified_base 1..19: /mod_base = "2'-hydroxy corresponding base"
ccgaagcacccgagcacggtt

SEQ ID NO: 116 - DNA, 21 bp, Artificial sequence
  siRNAs to PCSK9
  5'-terminal nucleic acid is a nucleoside, i.e. base + sugar but lacking 5'-phosphate
  modified_base 1..19: /mod_base = "2'-hydroxy corresponding base"
ccgugcucgggugcuucggtt

SEQ ID NO: 117 - DNA, 21 bp, Artificial sequence
  siRNAs to PCSK9
  5'-terminal nucleic acid is a nucleoside, i.e. base + sugar but lacking 5'-phosphate
  modified_base 1..19: /mod_base = "2'-hydroxy corresponding base"
ccgagcacggaaccacagctt

SEQ ID NO: 118 - DNA, 21 bp, Artificial sequence
  siRNAs to PCSK9
  5'-terminal nucleic acid is a nucleoside, i.e. base + sugar but lacking 5'-phosphate
  modified_base 1..19: /mod_base = "2'-hydroxy corresponding base"
gcugugguuccgugcucggtt

SEQ ID NO: 119 - DNA, 21 bp, Artificial sequence
  siRNAs to PCSK9
  5'-terminal nucleic acid is a nucleoside, i.e. base + sugar but lacking 5'-phosphate
  modified_base 1..19: /mod_base = "2'-hydroxy corresponding base"
caccgcugcgccaaggauctt

SEQ ID NO: 120 - DNA, 21 bp, Artificial sequence
  siRNAs to PCSK9
  5'-terminal nucleic acid is a nucleoside, i.e. base + sugar but lacking 5'-phosphate
  modified_base 1..19: /mod_base = "2'-hydroxy corresponding base"
gauccuuggcgcagcggugtt

SEQ ID NO: 121 - DNA, 21 bp, Artificial sequence
  siRNAs to PCSK9
  5'-terminal nucleic acid is a nucleoside, i.e. base + sugar but lacking 5'-phosphate
  modified_base 1..19: /mod_base = "2'-hydroxy corresponding base"
ccgcugcgccaaggauccgtt

SEQ ID NO: 122 - DNA, 21 bp, Artificial sequence
  siRNAs to PCSK9
  5'-terminal nucleic acid is a nucleoside, i.e. base + sugar but lacking 5'-phosphate
  modified_base 1..19: /mod_base = "2'-hydroxy corresponding base"
cggauccuuggcgcagcggtt

SEQ ID NO: 123 - DNA, 21 bp, Artificial sequence
  siRNAs to PCSK9
  5'-terminal nucleic acid is a nucleoside, i.e. base + sugar but lacking 5'-phosphate
  modified_base 1..19: /mod_base = "2'-hydroxy corresponding base"
cgcugcgccaaggauccgutt

SEQ ID NO: 124 - DNA, 21 bp, Artificial sequence
  siRNAs to PCSK9
  5'-terminal nucleic acid is a nucleoside, i.e. base + sugar but lacking 5'-phosphate
  modified_base 1..19: /mod_base = "2'-hydroxy corresponding base"
acggauccuuggcgcagcgtt

SEQ ID NO: 125 - DNA, 21 bp, Artificial sequence
  siRNAs to PCSK9
  5'-terminal nucleic acid is a nucleoside, i.e. base + sugar but lacking 5'-phosphate
  modified_base 1..19: /mod_base = "2'-hydroxy corresponding base"
cugcgccaaggauccguggtt

SEQ ID NO: 126 - DNA, 21 bp, Artificial sequence
  siRNAs to PCSK9
  5'-terminal nucleic acid is a nucleoside, i.e. base + sugar but lacking 5'-phosphate
  modified_base 1..19: /mod_base = "2'-hydroxy corresponding base"
ccacggauccuuggcgcagtt

SEQ ID NO: 127 - DNA, 21 bp, Artificial sequence
  siRNAs to PCSK9
  5'-terminal nucleic acid is a nucleoside, i.e. base + sugar but lacking 5'-phosphate
  modified_base 1..19: /mod_base = "2'-hydroxy corresponding base"
auccguggagguugccuggtt

SEQ ID NO: 128 - DNA, 21 bp, Artificial sequence
  siRNAs to PCSK9
  5'-terminal nucleic acid is a nucleoside, i.e. base + sugar but lacking 5'-phosphate
  modified_base 1..19: /mod_base = "2'-hydroxy corresponding base"
ccaggcaaccuccacggautt

SEQ ID NO: 129 - DNA, 21 bp, Artificial sequence
  siRNAs to PCSK9
  5'-terminal nucleic acid is a nucleoside, i.e. base + sugar but lacking 5'-phosphate
  modified_base 1..19: /mod_base = "2'-hydroxy corresponding base"
gguugccuggcaccuacgutt

SEQ ID NO: 130 - DNA, 21 bp, Artificial sequence
  siRNAs to PCSK9
  5'-terminal nucleic acid is a nucleoside, i.e. base + sugar but lacking 5'-phosphate
  modified_base 1..19: /mod_base = "2'-hydroxy corresponding base"
acguaggugccaggcaacctt

SEQ ID NO: 131 - DNA, 21 bp, Artificial sequence
  siRNAs to PCSK9
  5'-terminal nucleic acid is a nucleoside, i.e. base + sugar but lacking 5'-phosphate
  modified_base 1..19: /mod_base = "2'-hydroxy corresponding base"
aggagacccaccucucgcatt

SEQ ID NO: 132 - DNA, 21 bp, Artificial sequence
  siRNAs to PCSK9
  5'-terminal nucleic acid is a nucleoside, i.e. base + sugar but lacking 5'-phosphate
  modified_base 1..19: /mod_base = "2'-hydroxy corresponding base"
ugcgagaggugggucuccutt

SEQ ID NO: 133 - DNA, 21 bp, Artificial sequence
  siRNAs to PCSK9
  5'-terminal nucleic acid is a nucleoside, i.e. base + sugar but lacking 5'-phosphate
  modified_base 1..19: /mod_base = "2'-hydroxy corresponding base"
ggagacccaccucucgcagtt

SEQ ID NO: 134 - DNA, 21 bp, Artificial sequence
  siRNAs to PCSK9
  5'-terminal nucleic acid is a nucleoside, i.e. base + sugar but lacking 5'-phosphate
  modified_base 1..19: /mod_base = "2'-hydroxy corresponding base"
cugcgagaggugggucucctt

SEQ ID NO: 135 - DNA, 21 bp, Artificial sequence
  siRNAs to PCSK9
  5'-terminal nucleic acid is a nucleoside, i.e. base + sugar but lacking 5'-phosphate
  modified_base 1..19: /mod_base = "2'-hydroxy corresponding base"
gagacccaccucucgcagutt

SEQ ID NO: 136 - DNA, 21 bp, Artificial sequence
  siRNAs to PCSK9
  5'-terminal nucleic acid is a nucleoside, i.e. base + sugar but lacking 5'-phosphate
  modified_base 1..19: /mod_base = "2'-hydroxy corresponding base"
acugcgagaggugggucuctt

SEQ ID NO: 137 - DNA, 21 bp, Artificial sequence
  siRNAs to PCSK9
  5'-terminal nucleic acid is a nucleoside, i.e. base + sugar but lacking 5'-phosphate
  modified_base 1..19: /mod_base = "2'-hydroxy corresponding base"
ccaccucucgcagucagagtt

SEQ ID NO: 138 - DNA, 21 bp, Artificial sequence
  siRNAs to PCSK9
  5'-terminal nucleic acid is a nucleoside, i.e. base + sugar but lacking 5'-phosphate
  modified_base 1..19: /mod_base = "2'-hydroxy corresponding base"
cucugacugcgagagguggtt

SEQ ID NO: 139 - DNA, 21 bp, Artificial sequence
  siRNAs to PCSK9
  5'-terminal nucleic acid is a nucleoside, i.e. base + sugar but lacking 5'-phosphate
  modified_base 1..19: /mod_base = "2'-hydroxy corresponding base"
ccucucgcagucagagcgctt

SEQ ID NO: 140 - DNA, 21 bp, Artificial sequence
  siRNAs to PCSK9
  5'-terminal nucleic acid is a nucleoside, i.e. base + sugar but lacking 5'-phosphate
  modified_base 1..19: /mod_base = "2'-hydroxy corresponding base"
gcgcucugacugcgagaggtt

SEQ ID NO: 141 - DNA, 21 bp, Artificial sequence
  siRNAs to PCSK9
  5'-terminal nucleic acid is a nucleoside, i.e. base + sugar but lacking 5'-phosphate
  modified_base 1..19: /mod_base = "2'-hydroxy corresponding base"
cucucgcagucagagcgcatt

SEQ ID NO: 142 - DNA, 21 bp, Artificial sequence
  siRNAs to PCSK9
  5'-terminal nucleic acid is a nucleoside, i.e. base + sugar but lacking 5'-phosphate
  modified_base 1..19: /mod_base = "2'-hydroxy corresponding base"
ugcgcucugacugcgagagtt

SEQ ID NO: 143 - DNA, 21 bp, Artificial sequence
  siRNAs to PCSK9
  5'-terminal nucleic acid is a nucleoside, i.e. base + sugar but lacking 5'-phosphate
  modified_base 1..19: /mod_base = "2'-hydroxy corresponding base"
ucucgcagucagagcgcactt

SEQ ID NO: 144 - DNA, 21 bp, Artificial sequence
  siRNAs to PCSK9
  5'-terminal nucleic acid is a nucleoside, i.e. base + sugar but lacking 5'-phosphate
  modified_base 1..19: /mod_base = "2'-hydroxy corresponding base"
gugcgcucugacugcgagatt

SEQ ID NO: 145 - DNA, 21 bp, Artificial sequence
  siRNAs to PCSK9
  5'-terminal nucleic acid is a nucleoside, i.e. base + sugar but lacking 5'-phosphate
  modified_base 21: /mod_base = "5'-thio thymidine"
  modified_base 1..19: /mod_base = "2'-hydroxy corresponding base"
cucgcagucagagcgcacutt

SEQ ID NO: 146 - DNA, 21 bp, Artificial sequence
  siRNAs to PCSK9
  5'-terminal nucleic acid is a nucleoside, i.e. base + sugar but lacking 5'-phosphate
  modified_base 21: /mod_base = "5'-thio thymidine"
  modified_base 1..19: /mod_base = "2'-hydroxy corresponding base"
agugcgcucugacugcgagtt

SEQ ID NO: 147 - DNA, 21 bp, Artificial sequence
  siRNAs to PCSK9
  5'-terminal nucleic acid is a nucleoside, i.e. base + sugar but lacking 5'-phosphate
  modified_base 1, 2, 3, 5, 8, 9, 14, 16, 18, 19: /mod_base = "2'-O-methyl corresponding base"
  modified_base 21: /mod_base = "5'-thio thymidine"
  modified_base 4, 6, 7, 10, 11, 12, 13, 15, 17: /mod_base = "2'-hydroxy corresponding base"
cucgcagucagagcgcacutt

SEQ ID NO: 148 - DNA, 21 bp, Artificial sequence
  siRNAs to PCSK9
  5'-terminal nucleic acid is a nucleoside, i.e. base + sugar but lacking 5'-phosphate
  modified_base 21: /mod_base = "5'-thio thymidine"
  modified_base 1..19: /mod_base = "2'-hydroxy corresponding base"
agugcgcucugacugcgagtt

SEQ ID NO: 149 - DNA, 21 bp, Artificial sequence
  siRNAs to PCSK9
  5'-terminal nucleic acid is a nucleoside, i.e. base + sugar but lacking 5'-phosphate
  modified_base 21: /mod_base = "5'-thio thymidine"
  modified_base 1..19: /mod_base = "2'-hydroxy corresponding base"
gcagucagagcgcacugcctt

SEQ ID NO: 150 - DNA, 21 bp, Artificial sequence
  siRNAs to PCSK9
  5'-terminal nucleic acid is a nucleoside, i.e. base + sugar but lacking 5'-phosphate
  modified_base 21: /mod_base = "5'-thio thymidine"
  modified_base 1..19: /mod_base = "2'-hydroxy corresponding base"
ggcagugcgcucugacugctt

SEQ ID NO: 151 - DNA, 21 bp, Artificial sequence
  siRNAs to PCSK9
  5'-terminal nucleic acid is a nucleoside, i.e. base + sugar but lacking 5'-phosphate
  modified_base 2, 5, 6, 11, 13, 15, 16, 18, 19: /mod_base = "2'-O-methyl corresponding base"
  modified_base 21: /mod_base = "5'-thio thymidine"
  modified_base 1, 3, 4, 7, 8, 9, 10, 12, 14, 17: /mod_base = "2'-hydroxy corresponding base"
gcagucagagcgcacugcctt

SEQ ID NO: 152 - DNA, 21 bp, Artificial sequence
  siRNAs to PCSK9
  5'-terminal nucleic acid is a nucleoside, i.e. base + sugar but lacking 5'-phosphate
  modified_base 3: /mod_base = "2'-O-methyl corresponding base"
  modified_base 21: /mod_base = "5'-thio thymidine"
  modified_base 1, 2, 4, 5, 6, 7, 8, 9, 10, 11, 12, 13, 14, 15, 16, 17, 18, 19: /mod_base = "2'-hydroxy corresponding base"
ggcagugcgcucugacugctt

SEQ ID NO: 153 - DNA, 21 bp, Artificial sequence
  siRNAs to PCSK9
  5'-terminal nucleic acid is a nucleoside, i.e. base + sugar but lacking 5'-phosphate
  modified_base 21: /mod_base = "5'-thio thymidine"
  modified_base 1..19: /mod_base = "2'-hydroxy corresponding base"
gggauaccucaccaagauctt

SEQ ID NO: 154 - DNA, 21 bp, Artificial sequence
  siRNAs to PCSK9
  5'-terminal nucleic acid is a nucleoside, i.e. base + sugar but lacking 5'-phosphate
  modified_base 21: /mod_base = "5'-thio thymidine"
  modified_base 1..19: /mod_base = "2'-hydroxy corresponding base"
gaucuuggugagguauccctt

SEQ ID NO: 155 - DNA, 21 bp, Artificial sequence
  siRNAs to PCSK9
  5'-terminal nucleic acid is a nucleoside, i.e. base + sugar but lacking 5'-phosphate
  modified_base 5, 7, 8, 9, 10, 12, 13, 18, 19: /mod_base = "2'-O-methyl corresponding base"
  modified_base 21: /mod_base = "5'-thio thymidine"
  modified_base 1, 2, 3, 4, 6, 11, 14, 15, 16, 17: /mod_base = "2'-hydroxy corresponding base"
gggauaccucaccaagauctt

SEQ ID NO: 156 - DNA, 21 bp, Artificial sequence
  siRNAs to PCSK9
  5'-terminal nucleic acid is a nucleoside, i.e. base + sugar but lacking 5'-phosphate
  modified_base 14: /mod_base = "2'-O-methyl corresponding base"
  modified_base 21: /mod_base = "5'-thio thymidine"
  modified_base 1, 2, 3, 4, 5, 6, 7, 8, 9, 10, 11, 12, 13, 15, 16, 17, 18, 19: /mod_base = "2'-hydroxy corresponding base"
gaucuuggugagguauccctt

SEQ ID NO: 157 - DNA, 21 bp, Artificial sequence
  siRNAs to PCSK9
  5'-terminal nucleic acid is a nucleoside, i.e. base + sugar but lacking 5'-phosphate
  modified_base 21: /mod_base = "5'-thio thymidine"
  modified_base 1..19: /mod_base = "2'-hydroxy corresponding base"
uggugaagaugaguggcgatt

SEQ ID NO: 158 - DNA, 21 bp, Artificial sequence
  siRNAs to PCSK9
  5'-terminal nucleic acid is a nucleoside, i.e. base + sugar but lacking 5'-phosphate
  modified_base 21: /mod_base = "5'-thio thymidine"
  modified_base 1..19: /mod_base = "2'-hydroxy corresponding base"
ucgccacucaucuucaccatt

SEQ ID NO: 159 - DNA, 21 bp, Artificial sequence
  siRNAs to PCSK9
  5'-terminal nucleic acid is a nucleoside, i.e. base + sugar but lacking 5'-phosphate
  modified_base 1, 4, 10, 14, 17: /mod_base = "2'-O-methyl corresponding base"
  modified_base 21: /mod_base = "5'-thio thymidine"
  modified_base 2, 3, 5, 6, 7, 8, 9, 11, 12, 13, 15, 16, 18, 19: /mod_base = "2'-hydroxy corresponding base"
uggugaagaugaguggcgatt

SEQ ID NO: 160 - DNA, 21 bp, Artificial sequence
  siRNAs to PCSK9
  5'-terminal nucleic acid is a nucleoside, i.e. base + sugar but lacking 5'-phosphate
  modified_base 5, 9, 15, 18: /mod_base = "2'-O-methyl corresponding base"
  modified_base 21: /mod_base = "5'-thio thymidine"
  modified_base 1, 2, 3, 4, 6, 7, 8, 10, 11, 12, 13, 14, 16, 17, 19: /mod_base = "2'-hydroxy corresponding base"
ucgccacucaucuucaccatt

SEQ ID NO: 161 - DNA, 21 bp, Artificial sequence
  siRNAs to PCSK9
  5'-terminal nucleic acid is a nucleoside, i.e. base + sugar but lacking 5'-phosphate
  modified_base 21: /mod_base = "5'-thio thymidine"
  modified_base 1..19: /mod_base = "2'-hydroxy corresponding base"
gaagaugaguggcgaccugtt

SEQ ID NO: 162 - DNA, 21 bp, Artificial sequence
  siRNAs to PCSK9
  5'-terminal nucleic acid is a nucleoside, i.e. base + sugar but lacking 5'-phosphate
  modified_base 21: /mod_base = "5'-thio thymidine"
  modified_base 1..19: /mod_base = "2'-hydroxy corresponding base"
caggucgccacucaucuuctt

SEQ ID NO: 163 - DNA, 21 bp, Artificial sequence
  siRNAs to PCSK9
  5'-terminal nucleic acid is a nucleoside, i.e. base + sugar but lacking 5'-phosphate
  modified_base 6, 10, 13, 16, 17, 18: /mod_base = "2'-O-methyl corresponding base"
  modified_base 21: /mod_base = "5'-thio thymidine"
  modified_base 1, 2, 3, 4, 5, 7, 8, 9, 11, 12, 14, 15, 19: /mod_base = "2'-hydroxy corresponding base"
gaagaugaguggcgaccugtt

SEQ ID NO: 164 - DNA, 21 bp, Artificial sequence
  siRNAs to PCSK9
  5'-terminal nucleic acid is a nucleoside, i.e. base + sugar but lacking 5'-phosphate
  modified_base 1, 9, 13: /mod_base = "2'-O-methyl corresponding base"
  modified_base 21: /mod_base = "5'-thio thymidine"
  modified_base 2, 3, 4, 5, 6, 7, 8, 10, 11, 12, 14, 15, 16, 17, 18, 19: /mod_base = "2'-hydroxy corresponding base"
caggucgccacucaucuuctt

SEQ ID NO: 165 - DNA, 21 bp, Artificial sequence
  siRNAs to PCSK9
  5'-terminal nucleic acid is a nucleoside, i.e. base + sugar but lacking 5'-phosphate
  modified_base 21: /mod_base = "5'-thio thymidine"
  modified_base 1..19: /mod_base = "2'-hydroxy corresponding base"
cccaugucgacuacaucgatt

SEQ ID NO: 166 - DNA, 21 bp, Artificial sequence
  siRNAs to PCSK9
  5'-terminal nucleic acid is a nucleoside, i.e. base + sugar but lacking 5'-phosphate
  modified_base 21: /mod_base = "5'-thio thymidine"
  modified_base 1..19: /mod_base = "2'-hydroxy corresponding base"
ucgauguagucgacaugggtt

SEQ ID NO: 167 - DNA, 21 bp, Artificial sequence
  siRNAs to PCSK9
  5'-terminal nucleic acid is a nucleoside, i.e. base + sugar but lacking 5'-phosphate
  modified_base 1, 2, 3, 5, 7, 8, 11, 12, 14, 16, 17: /mod_base = "2'-O-methyl corresponding base"
  modified_base 21: /mod_base = "5'-thio thymidine"
  modified_base 4, 6, 9, 10, 13, 15, 18, 19: /mod_base = "2'-hydroxy corresponding base"
cccaugucgacuacaucgatt

SEQ ID NO: 168 - DNA, 21 bp, Artificial sequence
  siRNAs to PCSK9
  5'-terminal nucleic acid is a nucleoside, i.e. base + sugar but lacking 5'-phosphate
  modified_base 7, 14: /mod_base = "2'-O-methyl corresponding base"
  modified_base 21: /mod_base = "5'-thio thymidine"
  modified_base 1, 2, 3, 4, 5, 6, 8, 9, 10, 11, 12, 13, 15, 16, 17, 18, 19: /mod_base = "2'-hydroxy corresponding base"
ucgauguagucgacaugggtt

SEQ ID NO: 169 - DNA, 21 bp, Artificial sequence
  siRNAs to PCSK9
  5'-terminal nucleic acid is a nucleoside, i.e. base + sugar but lacking 5'-phosphate
  modified_base 21: /mod_base = "5'-thio thymidine"
  modified_base 1..19: /mod_base = "2'-hydroxy corresponding base"
aucgaggaggacuccucugtt

SEQ ID NO: 170 - DNA, 21 bp, Artificial sequence
  siRNAs to PCSK9
  5'-terminal nucleic acid is a nucleoside, i.e. base + sugar but lacking 5'-phosphate
  modified_base 21: /mod_base = "5'-thio thymidine"
  modified_base 1..19: /mod_base = "2'-hydroxy corresponding base"
cagaggaguccuccucgautt

SEQ ID NO: 171 - DNA, 21 bp, Artificial sequence
  siRNAs to PCSK9
  5'-terminal nucleic acid is a nucleoside, i.e. base + sugar but lacking 5'-phosphate
  modified_base 2, 3, 12, 13, 14, 15, 16, 17, 18: /mod_base = "2'-O-methyl corresponding base"
  modified_base 21: /mod_base = "5'-thio thymidine"
  modified_base 1, 4, 5, 6, 7, 8, 9, 10, 11, 19: /mod_base = "2'-hydroxy corresponding base"
aucgaggaggacuccucugtt

SEQ ID NO: 172 - DNA, 21 bp, Artificial sequence
  siRNAs to PCSK9
  5'-terminal nucleic acid is a nucleoside, i.e. base + sugar but lacking 5'-phosphate
  modified_base 1: /mod_base = "2'-O-methyl corresponding base"
  modified_base 21: /mod_base = "5'-thio thymidine"
  modified_base 2..19: /mod_base = "2'-hydroxy corresponding base"
cagaggaguccuccucgautt

SEQ ID NO: 173 - DNA, 21 bp, Artificial sequence
  siRNAs to PCSK9
  5'-terminal nucleic acid is a nucleoside, i.e. base + sugar but lacking 5'-phosphate
  modified_base 1..19: /mod_base = "2'-hydroxy corresponding base"
ggaaccuggagcggauuactt

SEQ ID NO: 174 - DNA, 21 bp, Artificial sequence
  siRNAs to PCSK9
  5'-terminal nucleic acid is a nucleoside, i.e. base + sugar but lacking 5'-phosphate
  modified_base 1..19: /mod_base = "2'-hydroxy corresponding base"
guaauccgcuccagguucctt

SEQ ID NO: 175 - DNA, 21 bp, Artificial sequence
  siRNAs to PCSK9
  5'-terminal nucleic acid is a nucleoside, i.e. base + sugar but lacking 5'-phosphate
  modified_base 1..19: /mod_base = "2'-hydroxy corresponding base"
gaaccuggagcggauuacctt

SEQ ID NO: 176 - DNA, 21 bp, Artificial sequence
  siRNAs to PCSK9
  5'-terminal nucleic acid is a nucleoside, i.e. base + sugar but lacking 5'-phosphate
  modified_base 1..19: /mod_base = "2'-hydroxy corresponding base"
gguaauccgcuccagguuctt

SEQ ID NO: 177 - DNA, 21 bp, Artificial sequence
  siRNAs to PCSK9
  5'-terminal nucleic acid is a nucleoside, i.e. base + sugar but lacking 5'-phosphate
  modified_base 1..19: /mod_base = "2'-hydroxy corresponding base"
aaccuggagcggauuaccctt

SEQ ID NO: 178 - DNA, 21 bp, Artificial sequence
  siRNAs to PCSK9
  5'-terminal nucleic acid is a nucleoside, i.e. base + sugar but lacking 5'-phosphate
  modified_base 1..19: /mod_base = "2'-hydroxy corresponding base"
ggguaauccgcuccagguutt

SEQ ID NO: 179 - DNA, 21 bp, Artificial sequence
  siRNAs to PCSK9
  5'-terminal nucleic acid is a nucleoside, i.e. base + sugar but lacking 5'-phosphate
  modified_base 1..19: /mod_base = "2'-hydroxy corresponding base"
cccuccacgguaccgggcgtt

SEQ ID NO: 180 - DNA, 21 bp, Artificial sequence
  siRNAs to PCSK9
  5'-terminal nucleic acid is a nucleoside, i.e. base + sugar but lacking 5'-phosphate
  modified_base 1..19: /mod_base = "2'-hydroxy corresponding base"
cgcccgguaccguggagggtt

SEQ ID NO: 181 - DNA, 21 bp, Artificial sequence
  siRNAs to PCSK9
  5'-terminal nucleic acid is a nucleoside, i.e. base + sugar but lacking 5'-phosphate
  modified_base 21: /mod_base = "5'-thio thymidine"
  modified_base 1..19: /mod_base = "2'-hydroxy corresponding base"
cacgguaccgggcggaugatt

SEQ ID NO: 182 - DNA, 21 bp, Artificial sequence
  siRNAs to PCSK9
  5'-terminal nucleic acid is a nucleoside, i.e. base + sugar but lacking 5'-phosphate
  modified_base 21: /mod_base = "5'-thio thymidine"
  modified_base 1..19: /mod_base = "2'-hydroxy corresponding base"
ucauccgcccgguaccgugtt

SEQ ID NO: 183 - DNA, 21 bp, Artificial sequence
  siRNAs to PCSK9
  5'-terminal nucleic acid is a nucleoside, i.e. base + sugar but lacking 5'-phosphate
  modified_base 1, 3, 6, 8, 9, 13, 17: /mod_base = "2'-O-methyl corresponding base"
  modified_base 21: /mod_base = "5'-thio thymidine"
  modified_base 2, 4, 5, 7, 10, 11, 12, 14, 15, 16, 18, 19: /mod_base = "2'-hydroxy corresponding base"
cacgguaccgggcggaugatt

SEQ ID NO: 184 - DNA, 21 bp, Artificial sequence
  siRNAs to PCSK9
  5'-terminal nucleic acid is a nucleoside, i.e. base + sugar but lacking 5'-phosphate
  modified_base 2, 13: /mod_base = "2'-O-methyl corresponding base"
  modified_base 21: /mod_base = "5'-thio thymidine"
  modified_base 1, 3, 4, 5, 6, 7, 8, 9, 10, 11, 12, 14, 15, 16, 17, 18, 19: /mod_base = "2'-hydroxy corresponding base"
ucauccgcccgguaccgugtt

SEQ ID NO: 185 - DNA, 21 bp, Artificial sequence
  siRNAs to PCSK9
  5'-terminal nucleic acid is a nucleoside, i.e. base + sugar but lacking 5'-phosphate
  modified_base 21: /mod_base = "5'-thio thymidine"
  modified_base 1..19: /mod_base = "2'-hydroxy corresponding base"
acgguaccgggcggaugaatt

SEQ ID NO: 186 - DNA, 21 bp, Artificial sequence
  siRNAs to PCSK9
  5'-terminal nucleic acid is a nucleoside, i.e. base + sugar but lacking 5'-phosphate
  modified_base 21: /mod_base = "5'-thio thymidine"
  modified_base 1..19: /mod_base = "2'-hydroxy corresponding base"
uucauccgcccgguaccgutt

SEQ ID NO: 187 - DNA, 21 bp, Artificial sequence
  siRNAs to PCSK9
  5'-terminal nucleic acid is a nucleoside, i.e. base + sugar but lacking 5'-phosphate
  modified_base 2, 5, 7, 8, 12, 16: /mod_base = "2'-O-methyl corresponding base"
  modified_base 21: /mod_base = "5'-thio thymidine"
  modified_base 1, 3, 4, 6, 9, 10, 11, 13, 14, 15, 17, 18, 19: /mod_base = "2'-hydroxy corresponding base"
acgguaccgggcggaugaatt

SEQ ID NO: 188 - DNA, 21 bp, Artificial sequence
  siRNAs to PCSK9
  5'-terminal nucleic acid is a nucleoside, i.e. base + sugar but lacking 5'-phosphate
  modified_base 3, 14: /mod_base = "2'-O-methyl corresponding base"
  modified_base 21: /mod_base = "5'-thio thymidine"
  modified_base 1, 2, 4, 5, 6, 7, 8, 9, 10, 11, 12, 13, 15, 16, 17, 18, 19: /mod_base = "2'-hydroxy corresponding base"
uucauccgcccgguaccgutt

SEQ ID NO: 189 - DNA, 21 bp, Artificial sequence
  siRNAs to PCSK9
  5'-terminal nucleic acid is a nucleoside, i.e. base + sugar but lacking 5'-phosphate
  modified_base 21: /mod_base = "5'-thio thymidine"
  modified_base 1..19: /mod_base = "2'-hydroxy corresponding base"
cgguaccgggcggaugaautt

SEQ ID NO: 190 - DNA, 21 bp, Artificial sequence
  siRNAs to PCSK9
  5'-terminal nucleic acid is a nucleoside, i.e. base + sugar but lacking 5'-phosphate
  modified_base 21: /mod_base = "5'-thio thymidine"
  modified_base 1..19: /mod_base = "2'-hydroxy corresponding base"
auucauccgcccgguaccgtt

SEQ ID NO: 191 - DNA, 21 bp, Artificial sequence
  siRNAs to PCSK9
  5'-terminal nucleic acid is a nucleoside, i.e. base + sugar but lacking 5'-phosphate
  modified_base 1, 4, 6, 7, 11, 15, 19: /mod_base = "2'-O-methyl corresponding base"
  modified_base 21: /mod_base = "5'-thio thymidine"
  modified_base 2, 3, 5, 8, 9, 10, 12, 13, 14, 16, 17, 18: /mod_base = "2'-hydroxy corresponding base"
cgguaccgggcggaugaautt

SEQ ID NO: 192 - DNA, 21 bp, Artificial sequence
  siRNAs to PCSK9
  5'-terminal nucleic acid is a nucleoside, i.e. base + sugar but lacking 5'-phosphate
  modified_base 4, 15: /mod_base = "2'-O-methyl corresponding base"
  modified_base 21: /mod_base = "5'-thio thymidine"
  modified_base 1, 2, 3, 5, 6, 7, 8, 9, 10, 11, 12, 13, 14, 16, 17, 18, 19: /mod_base = "2'-hydroxy corresponding base"
auucauccgcccgguaccgtt

SEQ ID NO: 193 - DNA, 21 bp, Artificial sequence
  siRNAs to PCSK9
  5'-terminal nucleic acid is a nucleoside, i.e. base + sugar but lacking 5'-phosphate
  modified_base 21: /mod_base = "5'-thio thymidine"
  modified_base 1..19: /mod_base = "2'-hydroxy corresponding base"
gguaccgggcggaugaauatt

SEQ ID NO: 194 - DNA, 21 bp, Artificial sequence
  siRNAs to PCSK9
  5'-terminal nucleic acid is a nucleoside, i.e. base + sugar but lacking 5'-phosphate
  modified_base 21: /mod_base = "5'-thio thymidine"
  modified_base 1..19: /mod_base = "2'-hydroxy corresponding base"
uauucauccgcccgguacctt

SEQ ID NO: 195 - DNA, 21 bp, Artificial sequence
  siRNAs to PCSK9
  5'-terminal nucleic acid is a nucleoside, i.e. base + sugar but lacking 5'-phosphate
  modified_base 3, 5, 6, 10, 14, 18: /mod_base = "2'-O-methyl corresponding base"
  modified_base 21: /mod_base = "5'-thio thymidine"
  modified_base 1, 2, 4, 7, 8, 9, 11, 12, 13, 15, 16, 17, 19: /mod_base = "2'-hydroxy corresponding base"
gguaccgggcggaugaauatt

SEQ ID NO: 196 - DNA, 21 bp, Artificial sequence
  siRNAs to PCSK9
  5'-terminal nucleic acid is a nucleoside, i.e. base + sugar but lacking 5'-phosphate
  modified_base 1, 5, 16: /mod_base = "2'-O-methyl corresponding base"
  modified_base 21: /mod_base = "5'-thio thymidine"
  modified_base 2, 3, 4, 6, 7, 8, 9, 10, 11, 12, 13, 14, 15, 17, 18, 19: /mod_base = "2'-hydroxy corresponding base"
uauucauccgcccgguacctt

SEQ ID NO: 197 - DNA, 21 bp, Artificial sequence
  siRNAs to PCSK9
  5'-terminal nucleic acid is a nucleoside, i.e. base + sugar but lacking 5'-phosphate
  modified_base 21: /mod_base = "5'-thio thymidine"
  modified_base 1..19: /mod_base = "2'-hydroxy corresponding base"
guaccgggcggaugaauactt

SEQ ID NO: 198 - DNA, 21 bp, Artificial sequence
  siRNAs to PCSK9
  5'-terminal nucleic acid is a nucleoside, i.e. base + sugar but lacking 5'-phosphate
  modified_base 21: /mod_base = "5'-thio thymidine"
  modified_base 1..19: /mod_base = "2'-hydroxy corresponding base"
guauucauccgcccgguactt

SEQ ID NO: 199 - DNA, 21 bp, Artificial sequence
  siRNAs to PCSK9
  5'-terminal nucleic acid is a nucleoside, i.e. base + sugar but lacking 5'-phosphate
  modified_base 2, 4, 5, 9, 13, 17, 19: /mod_base = "2'-O-methyl corresponding base"
  modified_base 21: /mod_base = "5'-thio thymidine"
  modified_base 1, 3, 6, 7, 8, 10, 11, 12, 14, 15, 16, 18: /mod_base = "2'-hydroxy corresponding base"
guaccgggcggaugaauactt

SEQ ID NO: 200 - DNA, 21 bp, Artificial sequence
  siRNAs to PCSK9
  5'-terminal nucleic acid is a nucleoside, i.e. base + sugar but lacking 5'-phosphate
  modified_base 2, 6, 17: /mod_base = "2'-O-methyl corresponding base"
  modified_base 21: /mod_base = "5'-thio thymidine"
  modified_base 1, 3, 4, 5, 7, 8, 9, 10, 11, 12, 13, 14, 15, 16, 18, 19: /mod_base = "2'-hydroxy corresponding base"
guauucauccgcccgguactt

SEQ ID NO: 201 - DNA, 21 bp, Artificial sequence
  siRNAs to PCSK9
  5'-terminal nucleic acid is a nucleoside, i.e. base + sugar but lacking 5'-phosphate
  modified_base 21: /mod_base = "5'-thio thymidine"
  modified_base 1..19: /mod_base = "2'-hydroxy corresponding base"
accgggcggaugaauaccatt

SEQ ID NO: 202 - DNA, 21 bp, Artificial sequence
  siRNAs to PCSK9
  5'-terminal nucleic acid is a nucleoside, i.e. base + sugar but lacking 5'-phosphate
  modified_base 21: /mod_base = "5'-thio thymidine"
  modified_base 1..19: /mod_base = "2'-hydroxy corresponding base"
ugguauucauccgcccggutt

SEQ ID NO: 203 - DNA, 21 bp, Artificial sequence
  siRNAs to PCSK9
  5'-terminal nucleic acid is a nucleoside, i.e. base + sugar but lacking 5'-phosphate
  modified_base 2, 3, 7, 11, 15, 17, 18: /mod_base = "2'-O-methyl corresponding base"
  modified_base 21: /mod_base = "5'-thio thymidine"
  modified_base 1, 4, 5, 6, 8, 9, 10, 12, 13, 14, 16, 19: /mod_base = "2'-hydroxy corresponding base"
accgggcggaugaauaccatt

SEQ ID NO: 204 - DNA, 21 bp, Artificial sequence
  siRNAs to PCSK9
  5'-terminal nucleic acid is a nucleoside, i.e. base + sugar but lacking 5'-phosphate
  modified_base 4, 8: /mod_base = "2'-O-methyl corresponding base"
  modified_base 21: /mod_base = "5'-thio thymidine"
  modified_base 1, 2, 3, 5, 6, 7, 9, 10, 11, 12, 13, 14, 15, 16, 17, 18, 19: /mod_base = "2'-hydroxy corresponding base"
ugguauucauccgcccggutt

SEQ ID NO: 205 - DNA, 21 bp, Artificial sequence
  siRNAs to PCSK9
  5'-terminal nucleic acid is a nucleoside, i.e. base + sugar but lacking 5'-phosphate
  modified_base 21: /mod_base = "5'-thio thymidine"
  modified_base 1..19: /mod_base = "2'-hydroxy corresponding base"
ccgggcggaugaauaccagtt

SEQ ID NO: 206 - DNA, 21 bp, Artificial sequence
  siRNAs to PCSK9
  5'-terminal nucleic acid is a nucleoside, i.e. base + sugar but lacking 5'-phosphate
  modified_base 21: /mod_base = "5'-thio thymidine"
  modified_base 1..19: /mod_base = "2'-hydroxy corresponding base"
cugguauucauccgcccggtt

SEQ ID NO: 207 - DNA, 21 bp, Artificial sequence
  siRNAs to PCSK9
  5'-terminal nucleic acid is a nucleoside, i.e. base + sugar but lacking 5'-phosphate
  modified_base 1, 2, 6, 10, 14, 16, 17: /mod_base = "2'-O-methyl corresponding base"
  modified_base 21: /mod_base = "5'-thio thymidine"
  modified_base 3, 4, 5, 7, 8, 9, 11, 12, 13, 15, 18, 19: /mod_base = "2'-hydroxy corresponding base"
ccgggcggaugaauaccagtt

SEQ ID NO: 208 - DNA, 21 bp, Artificial sequence
  siRNAs to PCSK9
  5'-terminal nucleic acid is a nucleoside, i.e. base + sugar but lacking 5'-phosphate
  modified_base 5, 9: /mod_base = "2'-O-methyl corresponding base"
  modified_base 21: /mod_base = "5'-thio thymidine"
  modified_base 1, 2, 3, 4, 6, 7, 8, 10, 11, 12, 13, 14, 15, 16, 17, 18, 19: /mod_base = "2'-hydroxy corresponding base"
cugguauucauccgcccggtt

SEQ ID NO: 209 - DNA, 21 bp, Artificial sequence
  siRNAs to PCSK9
  5'-terminal nucleic acid is a nucleoside, i.e. base + sugar but lacking 5'-phosphate
  modified_base 21: /mod_base = "5'-thio thymidine"
  modified_base 1..19: /mod_base = "2'-hydroxy corresponding base"
ccugguggagguguaucuctt

SEQ ID NO: 210 - DNA, 21 bp, Artificial sequence
  siRNAs to PCSK9
  5'-terminal nucleic acid is a nucleoside, i.e. base + sugar but lacking 5'-phosphate
  modified_base 21: /mod_base = "5'-thio thymidine"
  modified_base 1..19: /mod_base = "2'-hydroxy corresponding base"
gagauacaccuccaccaggtt

SEQ ID NO: 211 - DNA, 21 bp, Artificial sequence
  siRNAs to PCSK9
  5'-terminal nucleic acid is a nucleoside, i.e. base + sugar but lacking 5'-phosphate
  modified_base 1, 2, 3, 6, 12, 14, 16, 17, 18, 19: /mod_base = "2'-O-methyl corresponding base"
  modified_base 21: /mod_base = "5'-thio thymidine"
  modified_base 4, 5, 7, 8, 9, 10, 11, 13, 15: /mod_base = "2'-hydroxy corresponding base"
ccugguggagguguaucuctt

SEQ ID NO: 212 - DNA, 21 bp, Artificial sequence
  siRNAs to PCSK9
  5'-terminal nucleic acid is a nucleoside, i.e. base + sugar but lacking 5'-phosphate
  modified_base 5, 7, 13, 16: /mod_base = "2'-O-methyl corresponding base"
  modified_base 21: /mod_base = "5'-thio thymidine"
  modified_base 1, 2, 3, 4, 6, 8, 9, 10, 11, 12, 14, 15, 17, 18, 19: /mod_base = "2'-hydroxy corresponding base"
gagauacaccuccaccaggtt

SEQ ID NO: 213 - DNA, 21 bp, Artificial sequence
  siRNAs to PCSK9
  5'-terminal nucleic acid is a nucleoside, i.e. base + sugar but lacking 5'-phosphate
  modified_base 21: /mod_base = "5'-thio thymidine"
  modified_base 1..19: /mod_base = "2'-hydroxy corresponding base"
cugguggagguguaucucctt

SEQ ID NO: 214 - DNA, 21 bp, Artificial sequence
  siRNAs to PCSK9
  5'-terminal nucleic acid is a nucleoside, i.e. base + sugar but lacking 5'-phosphate
  modified_base 21: /mod_base = "5'-thio thymidine"
  modified_base 1..19: /mod_base = "2'-hydroxy corresponding base"
ggagauacaccuccaccagtt

SEQ ID NO: 215 - DNA, 21 bp, Artificial sequence
  siRNAs to PCSK9
  5'-terminal nucleic acid is a nucleoside, i.e. base + sugar but lacking 5'-phosphate
  modified_base 1, 2, 5, 11, 13, 15, 16, 17, 18, 19: /mod_base = "2'-O-methyl corresponding base"
  modified_base 21: /mod_base = "5'-thio thymidine"
  modified_base 3, 4, 6, 7, 8, 9, 10, 12, 14: /mod_base = "2'-hydroxy corresponding base"
cugguggagguguaucucctt

SEQ ID NO: 216 - DNA, 21 bp, Artificial sequence
  siRNAs to PCSK9
  5'-terminal nucleic acid is a nucleoside, i.e. base + sugar but lacking 5'-phosphate
  modified_base 6, 8, 14, 17: /mod_base = "2'-O-methyl corresponding base"
  modified_base 21: /mod_base = "5'-thio thymidine"
  modified_base 1, 2, 3, 4, 5, 7, 9, 10, 11, 12, 13, 15, 16, 18, 19: /mod_base = "2'-hydroxy corresponding base"
ggagauacaccuccaccagtt

SEQ ID NO: 217 - DNA, 21 bp, Artificial sequence
  siRNAs to PCSK9
  5'-terminal nucleic acid is a nucleoside, i.e. base + sugar but lacking 5'-phosphate
  modified_base 21: /mod_base = "5'-thio thymidine"
  modified_base 1..19: /mod_base = "2'-hydroxy corresponding base"
ugguggagguguaucuccutt

SEQ ID NO: 218 - DNA, 21 bp, Artificial sequence
  siRNAs to PCSK9
  5'-terminal nucleic acid is a nucleoside, i.e. base + sugar but lacking 5'-phosphate
  modified_base 21: /mod_base = "5'-thio thymidine"
  modified_base 1..19: /mod_base = "2'-hydroxy corresponding base"
aggagauacaccuccaccatt

SEQ ID NO: 219 - DNA, 21 bp, Artificial sequence
  siRNAs to PCSK9
  5'-terminal nucleic acid is a nucleoside, i.e. base + sugar but lacking 5'-phosphate
  modified_base 1, 4, 10, 12, 14, 15, 16, 17, 18, 19: /mod_base = "2'-O-methyl corresponding base"
  modified_base 21: /mod_base = "5'-thio thymidine"
  modified_base 2, 3, 5, 6, 7, 8, 9, 11, 13: /mod_base = "2'-hydroxy corresponding base"
ugguggagguguaucuccutt

SEQ ID NO: 220 - DNA, 21 bp, Artificial sequence
  siRNAs to PCSK9
  5'-terminal nucleic acid is a nucleoside, i.e. base + sugar but lacking 5'-phosphate
  modified_base 7, 9, 15, 18: /mod_base = "2'-O-methyl corresponding base"
  modified_base 21: /mod_base = "5'-thio thymidine"
  modified_base 1, 2, 3, 4, 5, 6, 8, 10, 11, 12, 13, 14, 16, 17, 19: /mod_base = "2'-hydroxy corresponding base"
aggagauacaccuccaccatt

SEQ ID NO: 221 - DNA, 21 bp, Artificial sequence
  siRNAs to PCSK9
  5'-terminal nucleic acid is a nucleoside, i.e. base + sugar but lacking 5'-phosphate
  modified_base 21: /mod_base = "5'-thio thymidine"
  modified_base 1..19: /mod_base = "2'-hydroxy corresponding base"
gguggagguguaucuccuatt

SEQ ID NO: 222 - DNA, 21 bp, Artificial sequence
  siRNAs to PCSK9
  5'-terminal nucleic acid is a nucleoside, i.e. base + sugar but lacking 5'-phosphate
  modified_base 21: /mod_base = "5'-thio thymidine"
  modified_base 1..19: /mod_base = "2'-hydroxy corresponding base"
uaggagauacaccuccacctt

SEQ ID NO: 223 - DNA, 21 bp, Artificial sequence
  siRNAs to PCSK9
  5'-terminal nucleic acid is a nucleoside, i.e. base + sugar but lacking 5'-phosphate
  modified_base 3, 9, 11, 13, 14, 15, 16, 17, 18: /mod_base = "2'-O-methyl corresponding base"
  modified_base 21: /mod_base = "5'-thio thymidine"
  modified_base 1, 2, 4, 5, 6, 7, 8, 10, 12, 19: /mod_base = "2'-hydroxy corresponding base"
gguggagguguaucuccuatt

SEQ ID NO: 224 - DNA, 21 bp, Artificial sequence
  siRNAs to PCSK9
  5'-terminal nucleic acid is a nucleoside, i.e. base + sugar but lacking 5'-phosphate
  modified_base 1, 8, 10, 16: /mod_base = "2'-O-methyl corresponding base"
  modified_base 21: /mod_base = "5'-thio thymidine"
  modified_base 2, 3, 4, 5, 6, 7, 9, 11, 12, 13, 14, 15, 17, 18, 19: /mod_base = "2'-hydroxy corresponding base"
uaggagauacaccuccacctt

SEQ ID NO: 225 - DNA, 21 bp, Artificial sequence
  siRNAs to PCSK9
  5'-terminal nucleic acid is a nucleoside, i.e. base + sugar but lacking 5'-phosphate
  modified_base 21: /mod_base = "5'-thio thymidine"
  modified_base 1..19: /mod_base = "2'-hydroxy corresponding base"
ggagguguaucuccuagactt

SEQ ID NO: 226 - DNA, 21 bp, Artificial sequence
  siRNAs to PCSK9
  5'-terminal nucleic acid is a nucleoside, i.e. base + sugar but lacking 5'-phosphate
  modified_base 21: /mod_base = "5'-thio thymidine"
  modified_base 1..19: /mod_base = "2'-hydroxy corresponding base"
gucuaggagauacaccucctt

SEQ ID NO: 227 - DNA, 21 bp, Artificial sequence
  siRNAs to PCSK9
  5'-terminal nucleic acid is a nucleoside, i.e. base + sugar but lacking 5'-phosphate
  modified_base 6, 8, 10, 11, 12, 13, 14, 15, 19: /mod_base = "2'-O-methyl corresponding base"
  modified_base 21: /mod_base = "5'-thio thymidine"
  modified_base 1, 2, 3, 4, 5, 7, 9, 16, 17, 18: /mod_base = "2'-hydroxy corresponding base"
ggagguguaucuccuagactt

SEQ ID NO: 228 - DNA, 21 bp, Artificial sequence
  siRNAs to PCSK9
  5'-terminal nucleic acid is a nucleoside, i.e. base + sugar but lacking 5'-phosphate
  modified_base 4, 11, 13: /mod_base = "2'-O-methyl corresponding base"
  modified_base 21: /mod_base = "5'-thio thymidine"
  modified_base 1, 2, 3, 5, 6, 7, 8, 9, 10, 12, 14, 15, 16, 17, 18, 19: /mod_base = "2'-hydroxy corresponding base"
gucuaggagauacaccucctt

SEQ ID NO: 229 - DNA, 21 bp, Artificial sequence
  siRNAs to PCSK9
  5'-terminal nucleic acid is a nucleoside, i.e. base + sugar but lacking 5'-phosphate
  modified_base 21: /mod_base = "5'-thio thymidine"
  modified_base 1..19: /mod_base = "2'-hydroxy corresponding base"
agguguaucuccuagacactt

SEQ ID NO: 230 - DNA, 21 bp, Artificial sequence
  siRNAs to PCSK9
  5'-terminal nucleic acid is a nucleoside, i.e. base + sugar but lacking 5'-phosphate
  modified_base 21: /mod_base = "5'-thio thymidine"
  modified_base 1..19: /mod_base = "2'-hydroxy corresponding base"
gugucuaggagauacaccutt

SEQ ID NO: 231 - DNA, 21 bp, Artificial sequence
  siRNAs to PCSK9
  5'-terminal nucleic acid is a nucleoside, i.e. base + sugar but lacking 5'-phosphate
  modified_base 4, 6, 8, 9, 10, 11, 12, 13, 17, 19: /mod_base = "2'-O-methyl corresponding base"
  modified_base 21: /mod_base = "5'-thio thymidine"
  modified_base 1, 2, 3, 5, 7, 14, 15, 16, 18: /mod_base = "2'-hydroxy corresponding base"
agguguaucuccuagacactt

SEQ ID NO: 232 - DNA, 21 bp, Artificial sequence
  siRNAs to PCSK9
  5'-terminal nucleic acid is a nucleoside, i.e. base + sugar but lacking 5'-phosphate
  modified_base 6, 13, 15: /mod_base = "2'-O-methyl corresponding base"
  modified_base 21: /mod_base = "5'-thio thymidine"
  modified_base 1, 2, 3, 4, 5, 7, 8, 9, 10, 11, 12, 14, 16, 17, 18, 19: /mod_base = "2'-hydroxy corresponding base"
gugucuaggagauacaccutt

SEQ ID NO: 233 - DNA, 21 bp, Artificial sequence
  siRNAs to PCSK9
  5'-terminal nucleic acid is a nucleoside, i.e. base + sugar but lacking 5'-phosphate
  modified_base 2, 4, 6, 8, 10, 12, 14, 16, 18: /mod_base = "2'-O-methyl corresponding base"
  modified_base 1, 3, 5, 7, 9, 11, 13, 15, 17, 19: /mod_base = "2'-deoxy-2'-fluoro corresponding base"
  modified_base 21: /mod_base = "5'-thio thymidine"
agguguaucuccuagacactt

SEQ ID NO: 234 - DNA, 21 bp, Artificial sequence
  siRNAs to PCSK9
  modified_base 1, 3, 5, 7, 9, 11, 13, 15, 17, 19: /mod_base = "2'-O-methyl corresponding base"
  modified_base 2, 4, 6, 8, 10, 12, 14, 16, 18: /mod_base = "2'-deoxy-2'-fluoro corresponding base"
  modified_base 21: /mod_base = "5'-thio thymidine"
gugucuaggagauacaccutt

SEQ ID NO: 235 - DNA, 21 bp, Artificial sequence
  siRNAs to PCSK9
  modified_base 4, 6, 8, 9, 10, 11, 12, 13, 17, 19: /mod_base = "2'-deoxy-2'-fluoro corresponding base"
  modified_base 21: /mod_base = "5'-thio thymidine"
  modified_base 1, 2, 3, 5, 7, 14, 15, 16, 18: /mod_base = "2'-hydroxy corresponding base"
agguguaucuccuagacactt

SEQ ID NO: 236 - DNA, 21 bp, Artificial sequence
  siRNAs to PCSK9
  modified_base 2, 4, 5, 6, 13, 15, 17, 18, 19: /mod_base = "2'-deoxy-2'-fluoro corresponding base"
  modified_base 21: /mod_base = "5'-thio thymidine"
  modified_base 1, 3, 7, 8, 9, 10, 11, 12, 14, 16: /mod_base = "2'-hydroxy corresponding base"
gugucuaggagauacaccutt

SEQ ID NO: 237 - DNA, 21 bp, Artificial sequence
  siRNAs to PCSK9
  modified_base 2, 4, 6, 8, 10, 12, 14, 16, 18: /mod_base = "2'-O-methyl corresponding base"
  modified_base 21: /mod_base = "5'-thio thymidine"
  modified_base 1, 3, 5, 7, 9, 11, 13, 15, 17, 19: /mod_base = "2'-hydroxy corresponding base"
agguguaucuccuagacactt

SEQ ID NO: 238 - DNA, 21 bp, Artificial sequence
  siRNAs to PCSK9
  modified_base 1, 3, 5, 7, 9, 11, 13, 15, 17, 19: /mod_base = "2'-O-methyl corresponding base"
  modified_base 2, 4, 6, 8, 10, 12, 14, 16, 18: /mod_base = "2'-deoxy-2'-fluoro corresponding base"
  modified_base 21: /mod_base = "5'-thio thymidine"
gugucuaggagauacaccutt

SEQ ID NO: 239 - DNA, 21 bp, Artificial sequence
  siRNAs to PCSK9
  modified_base 2, 4, 6, 8, 10, 12, 14, 16, 18: /mod_base = "2'-O-methyl corresponding base"
  modified_base 21: /mod_base = "5'-thio thymidine"
  modified_base 1, 3, 5, 7, 9, 11, 13, 15, 17, 19: /mod_base = "2'-hydroxy corresponding base"
agguguaucuccuagacactt

SEQ ID NO: 240 - DNA, 21 bp, Artificial sequence
  siRNAs to PCSK9
  modified_base 2, 4, 5, 6, 13, 15, 17, 18, 19: /mod_base = "2'-deoxy-2'-fluoro corresponding base"
  modified_base 21: /mod_base = "5'-thio thymidine"
  modified_base 1, 3, 7, 8, 9, 10, 11, 12, 14, 16: /mod_base = "2'-hydroxy corresponding base"
gugucuaggagauacaccutt

SEQ ID NO: 241 - DNA, 21 bp, Artificial sequence
  siRNAs to PCSK9
  modified_base 2, 4, 6, 8, 10, 12, 14, 16, 18: /mod_base = "2'-O-methyl corresponding base"
  modified_base 1, 3, 5, 7, 9, 11, 13, 15, 17, 19: /mod_base = "2'-deoxy-2'-fluoro corresponding base"
  modified_base 21: /mod_base = "5'-thio thymidine"
agguguaucuccuagacactt

SEQ ID NO: 242 - DNA, 21 bp, Artificial sequence
  siRNAs to PCSK9
  modified_base 6, 7, 10, 11, 17, 18, 19: /mod_base = "2'-O-methyl corresponding base"
  modified_base 21: /mod_base = "5'-thio thymidine"
  modified_base 1, 2, 3, 4, 5, 8, 9, 12, 13, 14, 15, 16: /mod_base = "2'-hydroxy corresponding base"
gugucuaggagauacaccutt

SEQ ID NO: 243 - DNA, 21 bp, Artificial sequence
  siRNAs to PCSK9
  modified_base 4, 6, 8, 9, 10, 11, 12, 13, 17, 19: /mod_base = "2'-deoxy-2'-fluoro corresponding base"
  modified_base 21: /mod_base = "5'-thio thymidine"
  modified_base 1, 2, 3, 5, 7, 14, 15, 16, 18: /mod_base = "2'-hydroxy corresponding base"
agguguaucuccuagacactt

SEQ ID NO: 244 - DNA, 21 bp, Artificial sequence
  siRNAs to PCSK9
  modified_base 6, 7, 10, 11, 17, 18, 19: /mod_base = "2'-O-methyl corresponding base"
  modified_base 21: /mod_base = "5'-thio thymidine"
  modified_base 1, 2, 3, 4, 5, 8, 9, 12, 13, 14, 15, 16: /mod_base = "2'-hydroxy corresponding base"
gugucuaggagauacaccutt

SEQ ID NO: 245 - DNA, 21 bp, Artificial sequence
  siRNAs to PCSK9
  modified_base 2, 4, 6, 8, 10, 12, 14, 16, 18: /mod_base = "2'-O-methyl corresponding base"
  modified_base 21: /mod_base = "5'-thio thymidine"
  modified_base 1, 3, 5, 7, 9, 11, 13, 15, 17, 19: /mod_base = "2'-hydroxy corresponding base"
agguguaucuccuagacactt

SEQ ID NO: 246 - DNA, 21 bp, Artificial sequence
  siRNAs to PCSK9
  modified_base 6, 7, 10, 11, 17, 18, 19: /mod_base = "2'-O-methyl corresponding base"
  modified_base 21: /mod_base = "5'-thio thymidine"
  modified_base 1, 2, 3, 4, 5, 8, 9, 12, 13, 14, 15, 16: /mod_base = "2'-hydroxy corresponding base"
gugucuaggagauacaccutt

SEQ ID NO: 247 - DNA, 21 bp, Artificial sequence
  siRNAs to PCSK9
  modified_base 2, 4, 6, 8, 10, 12, 14, 16, 18: /mod_base = "2'-O-methyl corresponding base"
  modified_base 1, 3, 5, 7, 9, 11, 13, 15, 17, 19: /mod_base = "2'-deoxy-2'-fluoro corresponding base"
  modified_base 21: /mod_base = "5'-thio thymidine"
gcacccucauaggccuggatt

SEQ ID NO: 248 - DNA, 21 bp, Artificial sequence
  siRNAs to PCSK9
  modified_base 1, 3, 5, 7, 9, 11, 13, 15, 17, 19: /mod_base = "2'-O-methyl corresponding base"
  modified_base 2, 4, 6, 8, 10, 12, 14, 16, 18: /mod_base = "2'-deoxy-2'-fluoro corresponding base"
  modified_base 21: /mod_base = "5'-thio thymidine"
uccaggccuaugagggugctt

SEQ ID NO: 249 - DNA, 21 bp, Artificial sequence
  siRNAs to PCSK9
  modified_base 2, 4, 5, 6, 7, 8, 10, 14, 15, 16: /mod_base = "2'-deoxy-2'-fluoro corresponding base"
  modified_base 21: /mod_base = "5'-thio thymidine"
  modified_base 1, 3, 9, 11, 12, 13, 17, 18, 19: /mod_base = "2'-hydroxy corresponding base"
gcacccucauaggccuggatt

SEQ ID NO: 250 - DNA, 21 bp, Artificial sequence
  siRNAs to PCSK9
  modified_base 1, 2, 3, 7, 8, 9, 11, 17, 19: /mod_base = "2'-deoxy-2'-fluoro corresponding base"
  modified_base 21: /mod_base = "5'-thio thymidine"
  modified_base 4, 5, 6, 10, 12, 13, 14, 15, 16, 18: /mod_base = "2'-hydroxy corresponding base"
uccaggccuaugagggugctt

SEQ ID NO: 251 - DNA, 21 bp, Artificial sequence
  siRNAs to PCSK9
  modified_base 2, 4, 6, 8, 10, 12, 14, 16, 18: /mod_base = "2'-O-methyl corresponding base"
  modified_base 21: /mod_base = "5'-thio thymidine"
  modified_base 1, 3, 5, 7, 9, 11, 13, 15, 17, 19: /mod_base = "2'-hydroxy corresponding base"
gcacccucauaggccuggatt

SEQ ID NO: 252 - DNA, 21 bp, Artificial sequence
  siRNAs to PCSK9
  modified_base 1, 3, 5, 7, 9, 11, 13, 15, 17, 19: /mod_base = "2'-O-methyl corresponding base"
  modified_base 2, 4, 6, 8, 10, 12, 14, 16, 18: /mod_base = "2'-deoxy-2'-fluoro corresponding base"
  modified_base 21: /mod_base = "5'-thio thymidine"
uccaggccuaugagggugctt

SEQ ID NO: 253 - DNA, 21 bp, Artificial sequence
  siRNAs to PCSK9
  modified_base 2, 4, 6, 8, 10, 12, 14, 16, 18: /mod_base = "2'-O-methyl corresponding base"
  modified_base 21: /mod_base = "5'-thio thymidine"
  modified_base 1, 3, 5, 7, 9, 11, 13, 15, 17, 19: /mod_base = "2'-hydroxy corresponding base"
gcacccucauaggccuggatt

SEQ ID NO: 254 - DNA, 21 bp, Artificial sequence
  siRNAs to PCSK9
  modified_base 1, 2, 3, 7, 8, 9, 11, 17, 19: /mod_base = "2'-deoxy-2'-fluoro corresponding base"
  modified_base 21: /mod_base = "5'-thio thymidine"
  modified_base 4, 5, 6, 10, 12, 13, 14, 15, 16, 18: /mod_base = "2'-hydroxy corresponding base"
uccaggccuaugagggugctt

SEQ ID NO: 255 - DNA, 21 bp, Artificial sequence
  siRNAs to PCSK9
  modified_base 2, 4, 6, 8, 10, 12, 14, 16, 18: /mod_base = "2'-O-methyl corresponding base"
  modified_base 1, 3, 5, 7, 9, 11, 13, 15, 17, 19: /mod_base = "2'-deoxy-2'-fluoro corresponding base"
  modified_base 21: /mod_base = "5'-thio thymidine"
gcacccucauaggccuggatt

SEQ ID NO: 256 - DNA, 21 bp, Artificial sequence
  siRNAs to PCSK9
  modified_base 6, 7, 10, 11, 17, 18, 19: /mod_base = "2'-O-methyl corresponding base"
  modified_base 21: /mod_base = "5'-thio thymidine"
  modified_base 1, 2, 3, 4, 5, 8, 9, 12, 13, 14, 15, 16: /mod_base = "2'-hydroxy corresponding base"
uccaggccuaugagggugctt

SEQ ID NO: 257 - DNA, 21 bp, Artificial sequence
  siRNAs to PCSK9
  modified_base 2, 4, 5, 6, 7, 8, 10, 14, 15, 16: /mod_base = "2'-deoxy-2'-fluoro corresponding base"
  modified_base 21: /mod_base = "5'-thio thymidine"
  modified_base 1, 3, 9, 11, 12, 13, 17, 18, 19: /mod_base = "2'-hydroxy corresponding base"
gcacccucauaggccuggatt

SEQ ID NO: 258 - DNA, 21 bp, Artificial sequence
  siRNAs to PCSK9
  modified_base 6, 7, 10, 11, 17, 18, 19: /mod_base = "2'-O-methyl corresponding base"
  modified_base 21: /mod_base = "5'-thio thymidine"
  modified_base 1, 2, 3, 4, 5, 8, 9, 12, 13, 14, 15, 16: /mod_base = "2'-hydroxy corresponding base"
uccaggccuaugagggugctt

SEQ ID NO: 259 - DNA, 21 bp, Artificial sequence
  siRNAs to PCSK9
  modified_base 2, 4, 6, 8, 10, 12, 14, 16, 18: /mod_base = "2'-O-methyl corresponding base"
  modified_base 21: /mod_base = "5'-thio thymidine"
  modified_base 1, 3, 5, 7, 9, 11, 13, 15, 17, 19: /mod_base = "2'-hydroxy corresponding base"
gcacccucauaggccuggatt

SEQ ID NO: 260 - DNA, 21 bp, Artificial sequence
  siRNAs to PCSK9
  modified_base 6, 7, 10, 11, 17, 18, 19: /mod_base = "2'-O-methyl corresponding base"
  modified_base 21: /mod_base = "5'-thio thymidine"
  modified_base 1, 2, 3, 4, 5, 8, 9, 12, 13, 14, 15, 16: /mod_base = "2'-hydroxy corresponding base"
uccaggccuaugagggugctt

SEQ ID NO: 261 - DNA, 21 bp, Artificial sequence
  siRNAs to PCSK9
  modified_base 21: /mod_base = "5'-thio thymidine"
  modified_base 1..19: /mod_base = "2'-hydroxy corresponding base"
uguaucuccuagacaccagtt

SEQ ID NO: 262 - DNA, 21 bp, Artificial sequence
  siRNAs to PCSK9
  modified_base 21: /mod_base = "5'-thio thymidine"
  modified_base 1..19: /mod_base = "2'-hydroxy corresponding base"
cuggugucuaggagauacatt

SEQ ID NO: 263 - DNA, 21 bp, Artificial sequence
  siRNAs to PCSK9
  modified_base 1, 3, 5, 6, 7, 8, 9, 10, 14, 16, 17: /mod_base = "2'-O-methyl corresponding base"
  modified_base 21: /mod_base = "5'-thio thymidine"
  modified_base 2, 4, 11, 12, 13, 15, 18, 19: /mod_base = "2'-hydroxy corresponding base"
uguaucuccuagacaccagtt

SEQ ID NO: 264 - DNA, 21 bp, Artificial sequence
  siRNAs to PCSK9
  modified_base 9, 16, 18: /mod_base = "2'-O-methyl corresponding base"
  modified_base 21: /mod_base = "5'-thio thymidine"
  modified_base 1, 2, 3, 4, 5, 6, 7, 8, 10, 11, 12, 13, 14, 15, 17, 19: /mod_base = "2'-hydroxy corresponding base"
cuggugucuaggagauacatt

SEQ ID NO: 265 - DNA, 21 bp, Artificial sequence
  siRNAs to PCSK9
  modified_base 21: /mod_base = "5'-thio thymidine"
  modified_base 1..19: /mod_base = "2'-hydroxy corresponding base"
ucuccuagacaccagcauatt

SEQ ID NO: 266 - DNA, 21 bp, Artificial sequence
  siRNAs to PCSK9
  modified_base 21: /mod_base = "5'-thio thymidine"
  modified_base 1..19: /mod_base = "2'-hydroxy corresponding base"
uaugcuggugucuaggagatt

SEQ ID NO: 267 - DNA, 21 bp, Artificial sequence
  siRNAs to PCSK9
  modified_base 1, 2, 3, 4, 5, 6, 10, 12, 13, 16, 18: /mod_base = "2'-O-methyl corresponding base"
  modified_base 21: /mod_base = "5'-thio thymidine"
  modified_base 7, 8, 9, 11, 14, 15, 17, 19: /mod_base = "2'-hydroxy corresponding base"
ucuccuagacaccagcauatt

SEQ ID NO: 268 - DNA, 21 bp, Artificial sequence
  siRNAs to PCSK9
  modified_base 1, 13: /mod_base = "2'-O-methyl corresponding base"
  modified_base 21: /mod_base = "5'-thio thymidine"
  modified_base 2, 3, 4, 5, 6, 7, 8, 9, 10, 11, 12, 14, 15, 16, 17, 18, 19: /mod_base = "2'-hydroxy corresponding base"
uaugcuggugucuaggagatt

SEQ ID NO: 269 - DNA, 21 bp, Artificial sequence
  siRNAs to PCSK9
  modified_base 2, 4, 6, 8, 10, 12, 14, 16, 18: /mod_base = "2'-O-methyl corresponding base"
  modified_base 1, 3, 5, 7, 9, 11, 13, 15, 17, 19: /mod_base = "2'-deoxy-2'-fluoro corresponding base"
  modified_base 21: /mod_base = "5'-thio thymidine"
ucuccuagacaccagcauatt

SEQ ID NO: 270 - DNA, 21 bp, Artificial sequence
  siRNAs to PCSK9
  modified_base 1, 3, 5, 7, 9, 11, 13, 15, 17, 19: /mod_base = "2'-O-methyl corresponding base"
  modified_base 2, 4, 6, 8, 10, 12, 14, 16, 18: /mod_base = "2'-deoxy-2'-fluoro corresponding base"
  modified_base 21: /mod_base = "5'-thio thymidine"
uaugcuggugucuaggagatt

SEQ ID NO: 271 - DNA, 21 bp, Artificial sequence
  siRNAs to PCSK9
  modified_base 1, 2, 3, 4, 5, 6, 10, 12, 13, 16, 18: /mod_base = "2'-deoxy-2'-fluoro corresponding base"
  modified_base 21: /mod_base = "5'-thio thymidine"
  modified_base 7, 8, 9, 11, 14, 15, 17, 19: /mod_base = "2'-hydroxy corresponding base"
ucuccuagacaccagcauatt

SEQ ID NO: 272 - DNA, 21 bp, Artificial sequence
  siRNAs to PCSK9
  modified_base 1, 3, 5, 6, 9, 11, 12, 13: /mod_base = "2'-deoxy-2'-fluoro corresponding base"
  modified_base 21: /mod_base = "5'-thio thymidine"
  modified_base 2, 4, 7, 8, 10, 14, 15, 16, 17, 18, 19: /mod_base = "2'-hydroxy corresponding base"
uaugcuggugucuaggagatt

SEQ ID NO: 273 - DNA, 21 bp, Artificial sequence
  siRNAs to PCSK9
  modified_base 2, 4, 6, 8, 10, 12, 14, 16, 18: /mod_base = "2'-O-methyl corresponding base"
  modified_base 21: /mod_base = "5'-thio thymidine"
  modified_base 1, 3, 5, 7, 9, 11, 13, 15, 17, 19: /mod_base = "2'-hydroxy corresponding base"
ucuccuagacaccagcauatt

SEQ ID NO: 274 - DNA, 21 bp, Artificial sequence
  siRNAs to PCSK9
  modified_base 1, 3, 5, 7, 9, 11, 13, 15, 17, 19: /mod_base = "2'-O-methyl corresponding base"
  modified_base 2, 4, 6, 8, 10, 12, 14, 16, 18: /mod_base = "2'-deoxy-2'-fluoro corresponding base"
  modified_base 21: /mod_base = "5'-thio thymidine"
uaugcuggugucuaggagatt

SEQ ID NO: 275 - DNA, 21 bp, Artificial sequence
  siRNAs to PCSK9
  modified_base 2, 4, 6, 8, 10, 12, 14, 16, 18: /mod_base = "2'-O-methyl corresponding base"
  modified_base 21: /mod_base = "5'-thio thymidine"
  modified_base 1, 3, 5, 7, 9, 11, 13, 15, 17, 19: /mod_base = "2'-hydroxy corresponding base"
ucuccuagacaccagcauatt

SEQ ID NO: 276 - DNA, 21 bp, Artificial sequence
  siRNAs to PCSK9
  modified_base 1, 3, 5, 6, 9, 11, 12, 13: /mod_base = "2'-deoxy-2'-fluoro corresponding base"
  modified_base 21: /mod_base = "5'-thio thymidine"
  modified_base 2, 4, 7, 8, 10, 14, 15, 16, 17, 18, 19: /mod_base = "2'-hydroxy corresponding base"
uaugcuggugucuaggagatt

SEQ ID NO: 277 - DNA, 21 bp, Artificial sequence
  siRNAs to PCSK9
  modified_base 2, 4, 6, 10, 12, 14, 16, 18: /mod_base = "2'-O-methyl corresponding base"
  modified_base 1, 3, 5, 8, 9, 11, 13, 15, 17, 19: /mod_base = "2'-deoxy-2'-fluoro corresponding base"
  modified_base 21: /mod_base = "5'-thio thymidine"
  modified_base 7: /mod_base = "2'-hydroxy corresponding base"
ucuccuaaacaccagcauatt

SEQ ID NO: 278 - DNA, 21 bp, Artificial sequence
  siRNAs to PCSK9
  modified_base 6, 7, 10, 11, 17, 18, 19: /mod_base = "2'-O-methyl corresponding base"
  modified_base 21: /mod_base = "5'-thio thymidine"
  modified_base 1, 2, 3, 4, 5, 8, 9, 12, 13, 14, 15, 16: /mod_base = "2'-hydroxy corresponding base"
uaugcuggugucuaggagatt

SEQ ID NO: 279 - DNA, 21 bp, Artificial sequence
  siRNAs to PCSK9
  modified_base 1, 2, 3, 4, 5, 6, 10, 12, 13, 16, 18: /mod_base = "2'-deoxy-2'-fluoro corresponding base"
  modified_base 21: /mod_base = "5'-thio thymidine"
  modified_base 7, 8, 9, 11, 14, 15, 17, 19: /mod_base = "2'-hydroxy corresponding base"
ucuccuagacaccagcauatt

SEQ ID NO: 280 - DNA, 21 bp, Artificial sequence
  siRNAs to PCSK9
  modified_base 6, 7, 10, 11, 17, 18, 19: /mod_base = "2'-O-methyl corresponding base"
  modified_base 21: /mod_base = "5'-thio thymidine"
  modified_base 1, 2, 3, 4, 5, 8, 9, 12, 13, 14, 15, 16: /mod_base = "2'-hydroxy corresponding base"
uaugcuggugucuaggagatt

SEQ ID NO: 281 - DNA, 21 bp, Artificial sequence
  siRNAs to PCSK9
  modified_base 2, 4, 6, 8, 10, 12, 14, 16, 18: /mod_base = "2'-O-methyl corresponding base"
  modified_base 21: /mod_base = "5'-thio thymidine"
  modified_base 1, 3, 5, 7, 9, 11, 13, 15, 17, 19: /mod_base = "2'-hydroxy corresponding base"
ucuccuagacaccagcauatt

SEQ ID NO: 282 - DNA, 21 bp, Artificial sequence
  siRNAs to PCSK9
  modified_base 6, 7, 10, 11, 17, 18, 19: /mod_base = "2'-O-methyl corresponding base"
  modified_base 21: /mod_base = "5'-thio thymidine"
  modified_base 1, 2, 3, 4, 5, 8, 9, 12, 13, 14, 15, 16: /mod_base = "2'-hydroxy corresponding base"
uaugcuggugucuaggagatt

SEQ ID NO: 283 - DNA, 21 bp, Artificial sequence
  siRNAs to PCSK9
  modified_base 2, 4, 6, 8, 10, 12, 14, 16, 18: /mod_base = "2'-O-methyl corresponding base"
  modified_base 1, 3, 5, 7, 9, 11, 13, 15, 17, 19: /mod_base = "2'-deoxy-2'-fluoro corresponding base"
  modified_base 21: /mod_base = "5'-thio thymidine"
aggccuggaguuuauucggtt

SEQ ID NO: 284 - DNA, 21 bp, Artificial sequence
  siRNAs to PCSK9
  modified_base 1, 3, 5, 7, 9, 11, 13, 15, 17, 19: /mod_base = "2'-O-methyl corresponding base"
  modified_base 2, 4, 6, 8, 10, 12, 14, 16, 18: /mod_base = "2'-deoxy-2'-fluoro corresponding base"
  modified_base 21: /mod_base = "5'-thio thymidine"
ccgaauaaacuccaggccutt

SEQ ID NO: 285 - DNA, 21 bp, Artificial sequence
  siRNAs to PCSK9
  modified_base 4, 5, 6, 11, 12, 13, 15, 16, 17: /mod_base = "2'-deoxy-2'-fluoro corresponding base"
  modified_base 21: /mod_base = "5'-thio thymidine"
  modified_base 1, 2, 3, 7, 8, 9, 10, 14, 18, 19: /mod_base = "2'-hydroxy corresponding base"
aggccuggaguuuauucggtt

SEQ ID NO: 286 - DNA, 21 bp, Artificial sequence
  siRNAs to PCSK9
  modified_base 1, 2, 6, 10, 11, 12, 13, 17, 18, 19: /mod_base = "2'-deoxy-2'-fluoro corresponding base"
  modified_base 21: /mod_base = "5'-thio thymidine"
  modified_base 3, 4, 5, 7, 8, 9, 14, 15, 16: /mod_base = "2'-hydroxy corresponding base"
ccgaauaaacuccaggccutt

SEQ ID NO: 287 - DNA, 21 bp, Artificial sequence
  siRNAs to PCSK9
  modified_base 2, 4, 6, 8, 10, 12, 14, 16, 18: /mod_base = "2'-O-methyl corresponding base"
  modified_base 21: /mod_base = "5'-thio thymidine"
  modified_base 1, 3, 5, 7, 9, 11, 13, 15, 17, 19: /mod_base = "2'-hydroxy corresponding base"
aggccuggaguuuauucggtt

SEQ ID NO: 288 - DNA, 21 bp, Artificial sequence
  siRNAs to PCSK9
  modified_base 1, 3, 5, 7, 9, 11, 13, 15, 17, 19: /mod_base = "2'-O-methyl corresponding base"
  modified_base 2, 4, 6, 8, 10, 12, 14, 16, 18: /mod_base = "2'-deoxy-2'-fluoro corresponding base"
  modified_base 21: /mod_base = "5'-thio thymidine"
ccgaauaaacuccaggccutt

SEQ ID NO: 289 - DNA, 21 bp, Artificial sequence
  siRNAs to PCSK9
  modified_base 2, 4, 6, 8, 10, 12, 14, 16, 18: /mod_base = "2'-O-methyl corresponding base"
  modified_base 21: /mod_base = "5'-thio thymidine"
  modified_base 1, 3, 5, 7, 9, 11, 13, 15, 17, 19: /mod_base = "2'-hydroxy corresponding base"
aggccuggaguuuauucggtt

SEQ ID NO: 290 - DNA, 21 bp, Artificial sequence
  siRNAs to PCSK9
  modified_base 1, 2, 6, 10, 11, 12, 13, 17, 18, 19: /mod_base = "2'-deoxy-2'-fluoro corresponding base"
  modified_base 21: /mod_base = "5'-thio thymidine"
  modified_base 3, 4, 5, 7, 8, 9, 14, 15, 16: /mod_base = "2'-hydroxy corresponding base"
ccgaauaaacuccaggccutt

SEQ ID NO: 291 - DNA, 21 bp, Artificial sequence
  siRNAs to PCSK9
  modified_base 2, 4, 6, 8, 10, 12, 14, 16, 18: /mod_base = "2'-O-methyl corresponding base"
  modified_base 1, 3, 5, 7, 9, 11, 13, 15, 17, 19: /mod_base = "2'-deoxy-2'-fluoro corresponding base"
  modified_base 21: /mod_base = "5'-thio thymidine"
aggccuggaguuuauucggtt

SEQ ID NO: 292 - DNA, 21 bp, Artificial sequence
  siRNAs to PCSK9
  modified_base 6, 7, 10, 11, 17, 18, 19: /mod_base = "2'-O-methyl corresponding base"
  modified_base 21: /mod_base = "5'-thio thymidine"
  modified_base 1, 2, 3, 4, 5, 8, 9, 12, 13, 14, 15, 16: /mod_base = "2'-hydroxy corresponding base"
ccgaauaaacuccaggccutt

SEQ ID NO: 293 - DNA, 21 bp, Artificial sequence
  siRNAs to PCSK9
  modified_base 4, 5, 6, 11, 12, 13, 15, 16, 17: /mod_base = "2'-deoxy-2'-fluoro corresponding base"
  modified_base 21: /mod_base = "5'-thio thymidine"
  modified_base 1, 2, 3, 7, 8, 9, 10, 14, 18, 19: /mod_base = "2'-hydroxy corresponding base"
aggccuggaguuuauucggtt

SEQ ID NO: 294 - DNA, 21 bp, Artificial sequence
  siRNAs to PCSK9
  modified_base 6, 7, 10, 11, 17, 18, 19: /mod_base = "2'-O-methyl corresponding base"
  modified_base 21: /mod_base = "5'-thio thymidine"
  modified_base 1, 2, 3, 4, 5, 8, 9, 12, 13, 14, 15, 16: /mod_base = "2'-hydroxy corresponding base"
ccgaauaaacuccaggccutt

SEQ ID NO: 295 - DNA, 21 bp, Artificial sequence
  siRNAs to PCSK9
  modified_base 2, 4, 6, 8, 10, 12, 14, 16, 18: /mod_base = "2'-O-methyl corresponding base"
  modified_base 21: /mod_base = "5'-thio thymidine"
  modified_base 1, 3, 5, 7, 9, 11, 13, 15, 17, 19: /mod_base = "2'-hydroxy corresponding base"
aggccuggaguuuauucggtt

SEQ ID NO: 296 - DNA, 21 bp, Artificial sequence
  siRNAs to PCSK9
  modified_base 6, 7, 10, 11, 17, 18, 19: /mod_base = "2'-O-methyl corresponding base"
  modified_base 21: /mod_base = "5'-thio thymidine"
  modified_base 1, 2, 3, 4, 5, 8, 9, 12, 13, 14, 15, 16: /mod_base = "2'-hydroxy corresponding base"
ccgaauaaacuccaggccutt

SEQ ID NO: 297 - DNA, 21 bp, Artificial sequence
  siRNAs to PCSK9
  modified_base 21: /mod_base = "5'-thio thymidine"
  modified_base 1..19: /mod_base = "2'-hydroxy corresponding base"
cuccuagacaccagcauactt

SEQ ID NO: 298 - DNA, 21 bp, Artificial sequence
  siRNAs to PCSK9
  modified_base 21: /mod_base = "5'-thio thymidine"
  modified_base 1..19: /mod_base = "2'-hydroxy corresponding base"
guaugcuggugucuaggagtt

SEQ ID NO: 299 - DNA, 21 bp, Artificial sequence
  siRNAs to PCSK9
  modified_base 1, 2, 3, 4, 5, 9, 11, 12, 15, 17, 19: /mod_base = "2'-O-methyl corresponding base"
  modified_base 21: /mod_base = "5'-thio thymidine"
  modified_base 6, 7, 8, 10, 13, 14, 16, 18: /mod_base = "2'-hydroxy corresponding base"
cuccuagacaccagcauactt

SEQ ID NO: 300 - DNA, 21 bp, Artificial sequence
  siRNAs to PCSK9
  modified_base 2, 14: /mod_base = "2'-O-methyl corresponding base"
  modified_base 21: /mod_base = "5'-thio thymidine"
  modified_base 1, 3, 4, 5, 6, 7, 8, 9, 10, 11, 12, 13, 15, 16, 17, 18, 19: /mod_base = "2'-hydroxy corresponding base"
guaugcuggugucuaggagtt

SEQ ID NO: 301 - DNA, 21 bp, Artificial sequence
  siRNAs to PCSK9
  modified_base 21: /mod_base = "5'-thio thymidine"
  modified_base 1..19: /mod_base = "2'-hydroxy corresponding base"
uccuagacaccagcauacatt

SEQ ID NO: 302 - DNA, 21 bp, Artificial sequence
  siRNAs to PCSK9
  modified_base 21: /mod_base = "5'-thio thymidine"
  modified_base 1..19: /mod_base = "2'-hydroxy corresponding base"
uguaugcuggugucuaggatt

SEQ ID NO: 303 - DNA, 21 bp, Artificial sequence
  siRNAs to PCSK9
  modified_base 1, 2, 3, 4, 8, 10, 11, 14, 16, 18: /mod_base = "2'-O-methyl corresponding base"
  modified_base 21: /mod_base = "5'-thio thymidine"
  modified_base 5, 6, 7, 9, 12, 13, 15, 17, 19: /mod_base = "2'-hydroxy corresponding base"
uccuagacaccagcauacatt

SEQ ID NO: 304 - DNA, 21 bp, Artificial sequence
  siRNAs to PCSK9
  modified_base 3, 15: /mod_base = "2'-O-methyl corresponding base"
  modified_base 21: /mod_base = "5'-thio thymidine"
  modified_base 1, 2, 4, 5, 6, 7, 8, 9, 10, 11, 12, 13, 14, 16, 17, 18, 19: /mod_base = "2'-hydroxy corresponding base"
uguaugcuggugucuaggatt

SEQ ID NO: 305 - DNA, 21 bp, Artificial sequence
  siRNAs to PCSK9
  modified_base 21: /mod_base = "5'-thio thymidine"
  modified_base 1..19: /mod_base = "2'-hydroxy corresponding base"
ccuagacaccagcauacagtt

SEQ ID NO: 306 - DNA, 21 bp, Artificial sequence
  siRNAs to PCSK9
  modified_base 21: /mod_base = "5'-thio thymidine"
  modified_base 1..19: /mod_base = "2'-hydroxy corresponding base"
cuguaugcuggugucuaggtt

SEQ ID NO: 307 - DNA, 21 bp, Artificial sequence
  siRNAs to PCSK9
  modified_base 1, 2, 3, 7, 9, 10, 13, 15, 17: /mod_base = "2'-O-methyl corresponding base"
  modified_base 21: /mod_base = "5'-thio thymidine"
  modified_base 4, 5, 6, 8, 11, 12, 14, 16, 18, 19: /mod_base = "2'-hydroxy corresponding base"
ccuagacaccagcauacagtt

SEQ ID NO: 308 - DNA, 21 bp, Artificial sequence
  siRNAs to PCSK9
  modified_base 4, 16: /mod_base = "2'-O-methyl corresponding base"
  modified_base 21: /mod_base = "5'-thio thymidine"
  modified_base 1, 2, 3, 5, 6, 7, 8, 9, 10, 11, 12, 13, 14, 15, 17, 18, 19: /mod_base = "2'-hydroxy corresponding base"
cuguaugcuggugucuaggtt

SEQ ID NO: 309 - DNA, 21 bp, Artificial sequence
  siRNAs to PCSK9
  modified_base 21: /mod_base = "5'-thio thymidine"
  modified_base 1..19: /mod_base = "2'-hydroxy corresponding base"
gacaccagcauacagagugtt

SEQ ID NO: 310 - DNA, 21 bp, Artificial sequence
  siRNAs to PCSK9
  modified_base 21: /mod_base = "5'-thio thymidine"
  modified_base 1..19: /mod_base = "2'-hydroxy corresponding base"
cacucuguaugcugguguctt

SEQ ID NO: 311 - DNA, 21 bp, Artificial sequence
  siRNAs to PCSK9
  modified_base 3, 5, 6, 9, 11, 13, 18: /mod_base = "2'-O-methyl corresponding base"
  modified_base 21: /mod_base = "5'-thio thymidine"
  modified_base 1, 2, 4, 7, 8, 10, 12, 14, 15, 16, 17, 19: /mod_base = "2'-hydroxy corresponding base"
gacaccagcauacagagugtt

SEQ ID NO: 312 - DNA, 21 bp, Artificial sequence
  siRNAs to PCSK9
  modified_base 1, 8: /mod_base = "2'-O-methyl corresponding base"
  modified_base 21: /mod_base = "5'-thio thymidine"
  modified_base 2, 3, 4, 5, 6, 7, 9, 10, 11, 12, 13, 14, 15, 16, 17, 18, 19: /mod_base = "2'-hydroxy corresponding base"
cacucuguaugcugguguctt

SEQ ID NO: 313 - DNA, 21 bp, Artificial sequence
  siRNAs to PCSK9
  modified_base 21: /mod_base = "5'-thio thymidine"
  modified_base 1..19: /mod_base = "2'-hydroxy corresponding base"
cauacagagugaccaccggtt

SEQ ID NO: 314 - DNA, 21 bp, Artificial sequence
  siRNAs to PCSK9
  modified_base 21: /mod_base = "5'-thio thymidine"
  modified_base 1..19: /mod_base = "2'-hydroxy corresponding base"
ccgguggucacucuguaugtt

SEQ ID NO: 315 - DNA, 21 bp, Artificial sequence
  siRNAs to PCSK9
  modified_base 1, 3, 5, 10, 13, 14, 16, 17: /mod_base = "2'-O-methyl corresponding base"
  modified_base 21: /mod_base = "5'-thio thymidine"
  modified_base 2, 4, 6, 7, 8, 9, 11, 12, 15, 18, 19: /mod_base = "2'-hydroxy corresponding base"
cauacagagugaccaccggtt

SEQ ID NO: 316 - DNA, 21 bp, Artificial sequence
  siRNAs to PCSK9
  modified_base 9, 16: /mod_base = "2'-O-methyl corresponding base"
  modified_base 21: /mod_base = "5'-thio thymidine"
  modified_base 1, 2, 3, 4, 5, 6, 7, 8, 10, 11, 12, 13, 14, 15, 17, 18, 19: /mod_base = "2'-hydroxy corresponding base"
ccgguggucacucuguaugtt

SEQ ID NO: 317 - DNA, 21 bp, Artificial sequence
  siRNAs to PCSK9
  modified_base 21: /mod_base = "5'-thio thymidine"
  modified_base 1..19: /mod_base = "2'-hydroxy corresponding base"
agagugaccaccgggaaautt

SEQ ID NO: 318 - DNA, 21 bp, Artificial sequence
  siRNAs to PCSK9
  modified_base 21: /mod_base = "5'-thio thymidine"
  modified_base 1..19: /mod_base = "2'-hydroxy corresponding base"
auuucccgguggucacucutt

SEQ ID NO: 319 - DNA, 21 bp, Artificial sequence
  siRNAs to PCSK9
  modified_base 5, 8, 9, 11, 12, 19: /mod_base = "2'-O-methyl corresponding base"
  modified_base 21: /mod_base = "5'-thio thymidine"
  modified_base 1, 2, 3, 4, 6, 7, 10, 13, 14, 15, 16, 17, 18: /mod_base = "2'-hydroxy corresponding base"
agagugaccaccgggaaautt

SEQ ID NO: 320 - DNA, 21 bp, Artificial sequence
  siRNAs to PCSK9
  modified_base 14: /mod_base = "2'-O-methyl corresponding base"
  modified_base 21: /mod_base = "5'-thio thymidine"
  modified_base 1, 2, 3, 4, 5, 6, 7, 8, 9, 10, 11, 12, 13, 15, 16, 17, 18, 19: /mod_base = "2'-hydroxy corresponding base"
auuucccgguggucacucutt

SEQ ID NO: 321 - DNA, 21 bp, Artificial sequence
  siRNAs to PCSK9
  modified_base 21: /mod_base = "5'-thio thymidine"
  modified_base 1..19: /mod_base = "2'-hydroxy corresponding base"
gagugaccaccgggaaauctt

SEQ ID NO: 322 - DNA, 21 bp, Artificial sequence
  siRNAs to PCSK9
  modified_base 21: /mod_base = "5'-thio thymidine"
  modified_base 1..19: /mod_base = "2'-hydroxy corresponding base"
gauuucccgguggucacuctt

SEQ ID NO: 323 - DNA, 21 bp, Artificial sequence
  siRNAs to PCSK9
  modified_base 4, 7, 8, 10, 11, 18, 19: /mod_base = "2'-O-methyl corresponding base"
  modified_base 21: /mod_base = "5'-thio thymidine"
  modified_base 1, 2, 3, 5, 6, 9, 12, 13, 14, 15, 16, 17: /mod_base = "2'-hydroxy corresponding base"
gagugaccaccgggaaauctt

SEQ ID NO: 324 - DNA, 21 bp, Artificial sequence
  siRNAs to PCSK9
  modified_base 15: /mod_base = "2'-O-methyl corresponding base"
  modified_base 21: /mod_base = "5'-thio thymidine"
  modified_base 1, 2, 3, 4, 5, 6, 7, 8, 9, 10, 11, 12, 13, 14, 16, 17, 18, 19: /mod_base = "2'-hydroxy corresponding base"
gauuucccgguggucacuctt

SEQ ID NO: 325 - DNA, 21 bp, Artificial sequence
  siRNAs to PCSK9
  modified_base 21: /mod_base = "5'-thio thymidine"
  modified_base 1..19: /mod_base = "2'-hydroxy corresponding base"
gugaccaccgggaaaucgatt

SEQ ID NO: 326 - DNA, 21 bp, Artificial sequence
  siRNAs to PCSK9
  modified_base 21: /mod_base = "5'-thio thymidine"
  modified_base 1..19: /mod_base = "2'-hydroxy corresponding base"
ucgauuucccgguggucactt

SEQ ID NO: 327 - DNA, 21 bp, Artificial sequence
  siRNAs to PCSK9
  modified_base 2, 5, 6, 8, 9, 16, 17: /mod_base = "2'-O-methyl corresponding base"
  modified_base 21: /mod_base = "5'-thio thymidine"
  modified_base 1, 3, 4, 7, 10, 11, 12, 13, 14, 15, 18, 19: /mod_base = "2'-hydroxy corresponding base"
gugaccaccgggaaaucgatt

SEQ ID NO: 328 - DNA, 21 bp, Artificial sequence
  siRNAs to PCSK9
  modified_base 17: /mod_base = "2'-O-methyl corresponding base"
  modified_base 21: /mod_base = "5'-thio thymidine"
  modified_base 1, 2, 3, 4, 5, 6, 7, 8, 9, 10, 11, 12, 13, 14, 15, 16, 18, 19: /mod_base = "2'-hydroxy corresponding base"
ucgauuucccgguggucactt

SEQ ID NO: 329 - DNA, 21 bp, Artificial sequence
  siRNAs to PCSK9
  modified_base 21: /mod_base = "5'-thio thymidine"
  modified_base 1..19: /mod_base = "2'-hydroxy corresponding base"
gaccaccgggaaaucgaggtt

SEQ ID NO: 330 - DNA, 21 bp, Artificial sequence
  siRNAs to PCSK9
  modified_base 21: /mod_base = "5'-thio thymidine"
  modified_base 1..19: /mod_base = "2'-hydroxy corresponding base"
ccucgauuucccggugguctt

SEQ ID NO: 331 - DNA, 21 bp, Artificial sequence
  siRNAs to PCSK9
  modified_base 3, 4, 6, 7, 14, 15: /mod_base = "2'-O-methyl corresponding base"
  modified_base 21: /mod_base = "5'-thio thymidine"
  modified_base 1, 2, 5, 8, 9, 10, 11, 12, 13, 16, 17, 18, 19: /mod_base = "2'-hydroxy corresponding base"
gaccaccgggaaaucgaggtt

SEQ ID NO: 332 - DNA, 21 bp, Artificial sequence
  siRNAs to PCSK9
  modified_base 21: /mod_base = "5'-thio thymidine"
  modified_base 1..19: /mod_base = "2'-hydroxy corresponding base"
ccucgauuucccggugguctt

SEQ ID NO: 333 - DNA, 21 bp, Artificial sequence
  siRNAs to PCSK9
  modified_base 21: /mod_base = "5'-thio thymidine"
  modified_base 1..19: /mod_base = "2'-hydroxy corresponding base"
accaccgggaaaucgagggtt

SEQ ID NO: 334 - DNA, 21 bp, Artificial sequence
  siRNAs to PCSK9
  modified_base 21: /mod_base = "5'-thio thymidine"
  modified_base 1..19: /mod_base = "2'-hydroxy corresponding base"
cccucgauuucccgguggutt

SEQ ID NO: 335 - DNA, 21 bp, Artificial sequence
  siRNAs to PCSK9
  modified_base 2, 3, 5, 6, 13, 14: /mod_base = "2'-O-methyl corresponding base"
  modified_base 21: /mod_base = "5'-thio thymidine"
  modified_base 1, 4, 7, 8, 9, 10, 11, 12, 15, 16, 17, 18, 19: /mod_base = "2'-hydroxy corresponding base"
accaccgggaaaucgagggtt

SEQ ID NO: 336 - DNA, 21 bp, Artificial sequence
  siRNAs to PCSK9
  modified_base 21: /mod_base = "5'-thio thymidine"
  modified_base 1..19: /mod_base = "2'-hydroxy corresponding base"
cccucgauuucccgguggutt

SEQ ID NO: 337 - DNA, 21 bp, Artificial sequence
  siRNAs to PCSK9
  modified_base 21: /mod_base = "5'-thio thymidine"
  modified_base 1..19: /mod_base = "2'-hydroxy corresponding base"
ccaccgggaaaucgagggctt

SEQ ID NO: 338 - DNA, 21 bp, Artificial sequence
  siRNAs to PCSK9
  modified_base 21: /mod_base = "5'-thio thymidine"
  modified_base 1..19: /mod_base = "2'-hydroxy corresponding base"
gcccucgauuucccgguggtt

SEQ ID NO: 339 - DNA, 21 bp, Artificial sequence
  siRNAs to PCSK9
  modified_base 1, 2, 4, 5, 12, 13, 19: /mod_base = "2'-O-methyl corresponding base"
  modified_base 21: /mod_base = "5'-thio thymidine"
  modified_base 3, 6, 7, 8, 9, 10, 11, 14, 15, 16, 17, 18: /mod_base = "2'-hydroxy corresponding base"
ccaccgggaaaucgagggctt

SEQ ID NO: 340 - DNA, 21 bp, Artificial sequence
  siRNAs to PCSK9
  modified_base 21: /mod_base = "5'-thio thymidine"
  modified_base 1..19: /mod_base = "2'-hydroxy corresponding base"
gcccucgauuucccgguggtt

SEQ ID NO: 341 - DNA, 21 bp, Artificial sequence
  siRNAs to PCSK9
  modified_base 21: /mod_base = "5'-thio thymidine"
  modified_base 1..19: /mod_base = "2'-hydroxy corresponding base"
aaaucgagggcagggucautt

SEQ ID NO: 342 - DNA, 21 bp, Artificial sequence
  siRNAs to PCSK9
  modified_base 21: /mod_base = "5'-thio thymidine"
  modified_base 1..19: /mod_base = "2'-hydroxy corresponding base"
augacccugcccucgauuutt

SEQ ID NO: 343 - DNA, 21 bp, Artificial sequence
  siRNAs to PCSK9
  modified_base 4, 5, 11, 16, 17, 19: /mod_base = "2'-O-methyl corresponding base"
  modified_base 21: /mod_base = "5'-thio thymidine"
  modified_base 1, 2, 3, 6, 7, 8, 9, 10, 12, 13, 14, 15, 18: /mod_base = "2'-hydroxy corresponding base"
aaaucgagggcagggucautt

SEQ ID NO: 344 - DNA, 21 bp, Artificial sequence
  siRNAs to PCSK9
  modified_base 21: /mod_base = "5'-thio thymidine"
  modified_base 1..19: /mod_base = "2'-hydroxy corresponding base"
augacccugcccucgauuutt

SEQ ID NO: 345 - DNA, 21 bp, Artificial sequence
  siRNAs to PCSK9
  modified_base 2, 4, 6, 8, 10, 12, 14, 16, 18: /mod_base = "2'-O-methyl corresponding base"
  modified_base 1, 3, 5, 7, 9, 11, 13, 15, 17, 19: /mod_base = "2'-deoxy-2'-fluoro corresponding base"
  modified_base 21: /mod_base = "5'-thio thymidine"
aaaucgagggcagggucautt

SEQ ID NO: 346 - DNA, 21 bp, Artificial sequence
  siRNAs to PCSK9
  modified_base 1, 3, 5, 7, 9, 11, 13, 15, 17, 19: /mod_base = "2'-O-methyl corresponding base"
  modified_base 2, 4, 6, 8, 10, 12, 14, 16, 18: /mod_base = "2'-deoxy-2'-fluoro corresponding base"
  modified_base 21: /mod_base = "5'-thio thymidine"
augacccugcccucgauuutt

SEQ ID NO: 347 - DNA, 21 bp, Artificial sequence
  siRNAs to PCSK9
  modified_base 4, 5, 11, 16, 17, 19: /mod_base = "2'-deoxy-2'-fluoro corresponding base"
  modified_base 21: /mod_base = "5'-thio thymidine"
  modified_base 1, 2, 3, 6, 7, 8, 9, 10, 12, 13, 14, 15, 18: /mod_base = "2'-hydroxy corresponding base"
aaaucgagggcagggucautt

SEQ ID NO: 348 - DNA, 21 bp, Artificial sequence
  siRNAs to PCSK9
  modified_base 2, 5, 6, 7, 8, 10, 11, 12, 13, 14, 17, 18, 19: /mod_base = "2'-deoxy-2'-fluoro corresponding base"
  modified_base 21: /mod_base = "5'-thio thymidine"
  modified_base 1, 3, 4, 9, 15, 16: /mod_base = "2'-hydroxy corresponding base"
augacccugcccucgauuutt

SEQ ID NO: 349 - DNA, 21 bp, Artificial sequence
  siRNAs to PCSK9
  modified_base 2, 4, 6, 8, 10, 12, 14, 16, 18: /mod_base = "2'-O-methyl corresponding base"
  modified_base 21: /mod_base = "5'-thio thymidine"
  modified_base 1, 3, 5, 7, 9, 11, 13, 15, 17, 19: /mod_base = "2'-hydroxy corresponding base"
aaaucgagggcagggucautt

SEQ ID NO: 350 - DNA, 21 bp, Artificial sequence
  siRNAs to PCSK9
  modified_base 1, 3, 5, 7, 9, 11, 13, 15, 17, 19: /mod_base = "2'-O-methyl corresponding base"
  modified_base 2, 4, 6, 8, 10, 12, 14, 16, 18: /mod_base = "2'-deoxy-2'-fluoro corresponding base"
  modified_base 21: /mod_base = "5'-thio thymidine"
augacccugcccucgauuutt

SEQ ID NO: 351 - DNA, 21 bp, Artificial sequence
  siRNAs to PCSK9
  modified_base 2, 4, 6, 8, 10, 12, 14, 16, 18: /mod_base = "2'-O-methyl corresponding base"
  modified_base 21: /mod_base = "5'-thio thymidine"
  modified_base 1, 3, 5, 7, 9, 11, 13, 15, 17, 19: /mod_base = "2'-hydroxy corresponding base"
aaaucgagggcagggucautt

SEQ ID NO: 352 - DNA, 21 bp, Artificial sequence
  siRNAs to PCSK9
  modified_base 2, 5, 6, 7, 8, 10, 11, 12, 13, 14, 17, 18, 19: /mod_base = "2'-deoxy-2'-fluoro corresponding base"
  modified_base 21: /mod_base = "5'-thio thymidine"
  modified_base 1, 3, 4, 9, 15, 16: /mod_base = "2'-hydroxy corresponding base"
augacccugcccucgauuutt

SEQ ID NO: 353 - DNA, 21 bp, Artificial sequence
  siRNAs to PCSK9
  modified_base 2, 4, 6, 8, 10, 12, 14, 16, 18: /mod_base = "2'-O-methyl corresponding base"
  modified_base 1, 3, 5, 7, 9, 11, 13, 15, 17, 19: /mod_base = "2'-deoxy-2'-fluoro corresponding base"
  modified_base 21: /mod_base = "5'-thio thymidine"
aaaucgagggcagggucautt

SEQ ID NO: 354 - DNA, 21 bp, Artificial sequence
  siRNAs to PCSK9
  modified_base 6, 7, 10, 11, 17, 18, 19: /mod_base = "2'-O-methyl corresponding base"
  modified_base 21: /mod_base = "5'-thio thymidine"
  modified_base 1, 2, 3, 4, 5, 8, 9, 12, 13, 14, 15, 16: /mod_base = "2'-hydroxy corresponding base"
augacccugcccucgauuutt

SEQ ID NO: 355 - DNA, 21 bp, Artificial sequence
  siRNAs to PCSK9
  modified_base 4, 5, 11, 16, 17, 19: /mod_base = "2'-deoxy-2'-fluoro corresponding base"
  modified_base 21: /mod_base = "5'-thio thymidine"
  modified_base 1, 2, 3, 6, 7, 8, 9, 10, 12, 13, 14, 15, 18: /mod_base = "2'-hydroxy corresponding base"
aaaucgagggcagggucautt

SEQ ID NO: 356 - DNA, 21 bp, Artificial sequence
  siRNAs to PCSK9
  modified_base 6, 7, 10, 11, 17, 18, 19: /mod_base = "2'-O-methyl corresponding base"
  modified_base 21: /mod_base = "5'-thio thymidine"
  modified_base 1, 2, 3, 4, 5, 8, 9, 12, 13, 14, 15, 16: /mod_base = "2'-hydroxy corresponding base"
augacccugcccucgauuutt

SEQ ID NO: 357 - DNA, 21 bp, Artificial sequence
  siRNAs to PCSK9
  modified_base 2, 4, 6, 8, 10, 12, 14, 16, 18: /mod_base = "2'-O-methyl corresponding base"
  modified_base 21: /mod_base = "5'-thio thymidine"
  modified_base 1, 3, 5, 7, 9, 11, 13, 15, 17, 19: /mod_base = "2'-hydroxy corresponding base"
aaaucgagggcagggucautt

SEQ ID NO: 358 - DNA, 21 bp, Artificial sequence
  siRNAs to PCSK9
  modified_base 6, 7, 10, 11, 17, 18, 19: /mod_base = "2'-O-methyl corresponding base"
  modified_base 21: /mod_base = "5'-thio thymidine"
  modified_base 1, 2, 3, 4, 5, 8, 9, 12, 13, 14, 15, 16: /mod_base = "2'-hydroxy corresponding base"
augacccugcccucgauuutt

SEQ ID NO: 359 - DNA, 21 bp, Artificial sequence
  siRNAs to PCSK9
  modified_base 2, 4, 6, 8, 10, 12, 14, 16, 18: /mod_base = "2'-O-methyl corresponding base"
  modified_base 1, 3, 5, 7, 9, 11, 13, 15, 17, 19: /mod_base = "2'-deoxy-2'-fluoro corresponding base"
  modified_base 21: /mod_base = "5'-thio thymidine"
cggcacccucauaggccugtt

SEQ ID NO: 360 - DNA, 21 bp, Artificial sequence
  siRNAs to PCSK9
  modified_base 1, 3, 5, 7, 9, 11, 13, 15, 17, 19: /mod_base = "2'-O-methyl corresponding base"
  modified_base 2, 4, 6, 8, 10, 12, 14, 16, 18: /mod_base = "2'-deoxy-2'-fluoro corresponding base"
  modified_base 21: /mod_base = "5'-thio thymidine"
caggccuaugagggugccgtt

SEQ ID NO: 361 - DNA, 21 bp, Artificial sequence
  siRNAs to PCSK9
  modified_base 1, 4, 6, 7, 8, 9, 10, 12, 16, 17, 18: /mod_base = "2'-deoxy-2'-fluoro corresponding base"
  modified_base 21: /mod_base = "5'-thio thymidine"
  modified_base 2, 3, 5, 11, 13, 14, 15, 19: /mod_base = "2'-hydroxy corresponding base"
cggcacccucauaggccugtt

SEQ ID NO: 362 - DNA, 21 bp, Artificial sequence
  siRNAs to PCSK9
  modified_base 1, 5, 6, 7, 9, 15, 17, 18: /mod_base = "2'-deoxy-2'-fluoro corresponding base"
  modified_base 21: /mod_base = "5'-thio thymidine"
  modified_base 2, 3, 4, 8, 10, 11, 12, 13, 14, 16, 19: /mod_base = "2'-hydroxy corresponding base"
caggccuaugagggugccgtt

SEQ ID NO: 363 - DNA, 21 bp, Artificial sequence
  siRNAs to PCSK9
  modified_base 2, 4, 6, 8, 10, 12, 14, 16, 18: /mod_base = "2'-O-methyl corresponding base"
  modified_base 21: /mod_base = "5'-thio thymidine"
  modified_base 1, 3, 5, 7, 9, 11, 13, 15, 17, 19: /mod_base = "2'-hydroxy corresponding base"
cggcacccucauaggccugtt

SEQ ID NO: 364 - DNA, 21 bp, Artificial sequence
  siRNAs to PCSK9
  modified_base 1, 3, 5, 7, 9, 11, 13, 15, 17, 19: /mod_base = "2'-O-methyl corresponding base"
  modified_base 2, 4, 6, 8, 10, 12, 14, 16, 18: /mod_base = "2'-deoxy-2'-fluoro corresponding base"
  modified_base 21: /mod_base = "5'-thio thymidine"
caggccuaugagggugccgtt

SEQ ID NO: 365 - DNA, 21 bp, Artificial sequence
  siRNAs to PCSK9
  modified_base 2, 4, 6, 8, 10, 12, 14, 16, 18: /mod_base = "2'-O-methyl corresponding base"
  modified_base 21: /mod_base = "5'-thio thymidine"
  modified_base 1, 3, 5, 7, 9, 11, 13, 15, 17, 19: /mod_base = "2'-hydroxy corresponding base"
cggcacccucauaggccugtt

SEQ ID NO: 366 - DNA, 21 bp, Artificial sequence
  siRNAs to PCSK9
  modified_base 1, 5, 6, 7, 9, 15, 17, 18: /mod_base = "2'-deoxy-2'-fluoro corresponding base"
  modified_base 21: /mod_base = "5'-thio thymidine"
  modified_base 2, 3, 4, 8, 10, 11, 12, 13, 14, 16, 19: /mod_base = "2'-hydroxy corresponding base"
caggccuaugagggugccgtt

SEQ ID NO: 367 - DNA, 21 bp, Artificial sequence
  siRNAs to PCSK9
  modified_base 2, 4, 6, 8, 10, 12, 14, 16, 18: /mod_base = "2'-O-methyl corresponding base"
  modified_base 1, 3, 5, 7, 9, 11, 13, 15, 17, 19: /mod_base = "2'-deoxy-2'-fluoro corresponding base"
  modified_base 21: /mod_base = "5'-thio thymidine"
cggcacccucauaggccugtt

SEQ ID NO: 368 - DNA, 21 bp, Artificial sequence
  siRNAs to PCSK9
  modified_base 6, 7, 10, 11, 17, 18, 19: /mod_base = "2'-O-methyl corresponding base"
  modified_base 21: /mod_base = "5'-thio thymidine"
  modified_base 1, 2, 3, 4, 5, 8, 9, 12, 13, 14, 15, 16: /mod_base = "2'-hydroxy corresponding base"
caggccuaugagggugccgtt

SEQ ID NO: 369 - DNA, 21 bp, Artificial sequence
  siRNAs to PCSK9
  modified_base 1, 4, 6, 7, 8, 9, 10, 12, 16, 17, 18: /mod_base = "2'-deoxy-2'-fluoro corresponding base"
  modified_base 21: /mod_base = "5'-thio thymidine"
  modified_base 2, 3, 5, 11, 13, 14, 15, 19: /mod_base = "2'-hydroxy corresponding base"
cggcacccucauaggccugtt

SEQ ID NO: 370 - DNA, 21 bp, Artificial sequence
  siRNAs to PCSK9
  modified_base 6, 7, 10, 11, 17, 18, 19: /mod_base = "2'-O-methyl corresponding base"
  modified_base 21: /mod_base = "5'-thio thymidine"
  modified_base 1, 2, 3, 4, 5, 8, 9, 12, 13, 14, 15, 16: /mod_base = "2'-hydroxy corresponding base"
caggccuaugagggugccgtt

SEQ ID NO: 371 - DNA, 21 bp, Artificial sequence
  siRNAs to PCSK9
  modified_base 2, 4, 6, 8, 10, 12, 14, 16, 18: /mod_base = "2'-O-methyl corresponding base"
  modified_base 21: /mod_base = "5'-thio thymidine"
  modified_base 1, 3, 5, 7, 9, 11, 13, 15, 17, 19: /mod_base = "2'-hydroxy corresponding base"
cggcacccucauaggccugtt

SEQ ID NO: 372 - DNA, 21 bp, Artificial sequence
  siRNAs to PCSK9
  modified_base 6, 7, 10, 11, 17, 18, 19: /mod_base = "2'-O-methyl corresponding base"
  modified_base 21: /mod_base = "5'-thio thymidine"
  modified_base 1, 2, 3, 4, 5, 8, 9, 12, 13, 14, 15, 16: /mod_base = "2'-hydroxy corresponding base"
caggccuaugagggugccgtt

SEQ ID NO: 373 - DNA, 21 bp, Artificial sequence
  siRNAs to PCSK9
  modified_base 21: /mod_base = "5'-thio thymidine"
  modified_base 1..19: /mod_base = "2'-hydroxy corresponding base"
aucgagggcagggucauggtt

SEQ ID NO: 374 - DNA, 21 bp, Artificial sequence
  siRNAs to PCSK9
  modified_base 21: /mod_base = "5'-thio thymidine"
  modified_base 1..19: /mod_base = "2'-hydroxy corresponding base"
ccaugacccugcccucgautt

SEQ ID NO: 375 - DNA, 21 bp, Artificial sequence
  siRNAs to PCSK9
  modified_base 2, 3, 9, 14, 15, 17: /mod_base = "2'-O-methyl corresponding base"
  modified_base 21: /mod_base = "5'-thio thymidine"
  modified_base 1, 4, 5, 6, 7, 8, 10, 11, 12, 13, 16, 18, 19: /mod_base = "2'-hydroxy corresponding base"
aucgagggcagggucauggtt

SEQ ID NO: 376 - DNA, 21 bp, Artificial sequence
  siRNAs to PCSK9
  modified_base 2: /mod_base = "2'-O-methyl corresponding base"
  modified_base 21: /mod_base = "5'-thio thymidine"
  modified_base 1, 3, 4, 5, 6, 7, 8, 9, 10, 11, 12, 13, 14, 15, 16, 17, 18, 19: /mod_base = "2'-hydroxy corresponding base"
ccaugacccugcccucgautt

SEQ ID NO: 377 - DNA, 21 bp, Artificial sequence
  siRNAs to PCSK9
  modified_base 1, 7, 12, 13, 15, 18, 19: /mod_base = "2'-O-methyl corresponding base"
  modified_base 21: /mod_base = "5'-thio thymidine"
  modified_base 2, 3, 4, 5, 6, 8, 9, 10, 11, 14, 16, 17: /mod_base = "2'-hydroxy corresponding base"
cgagggcagggucaugguctt

SEQ ID NO: 378 - DNA, 21 bp, Artificial sequence
  siRNAs to PCSK9
  modified_base 4: /mod_base = "2'-O-methyl corresponding base"
  modified_base 21: /mod_base = "5'-thio thymidine"
  modified_base 1, 2, 3, 5, 6, 7, 8, 9, 10, 11, 12, 13, 14, 15, 16, 17, 18, 19: /mod_base = "2'-hydroxy corresponding base"
gaccaugacccugcccucgtt

SEQ ID NO: 379 - DNA, 21 bp, Artificial sequence
  siRNAs to PCSK9
  modified_base 21: /mod_base = "5'-thio thymidine"
  modified_base 1..19: /mod_base = "2'-hydroxy corresponding base"
gagggcagggucauggucatt

SEQ ID NO: 380 - DNA, 21 bp, Artificial sequence
  siRNAs to PCSK9
  modified_base 21: /mod_base = "5'-thio thymidine"
  modified_base 1..19: /mod_base = "2'-hydroxy corresponding base"
ugaccaugacccugcccuctt

SEQ ID NO: 381 - DNA, 21 bp, Artificial sequence
  siRNAs to PCSK9
  modified_base 6, 11, 12, 14, 17, 18: /mod_base = "2'-O-methyl corresponding base"
  modified_base 21: /mod_base = "5'-thio thymidine"
  modified_base 1, 2, 3, 4, 5, 7, 8, 9, 10, 13, 15, 16, 19: /mod_base = "2'-hydroxy corresponding base"
gagggcagggucauggucatt

SEQ ID NO: 382 - DNA, 21 bp, Artificial sequence
  siRNAs to PCSK9
  modified_base 5: /mod_base = "2'-O-methyl corresponding base"
  modified_base 21: /mod_base = "5'-thio thymidine"
  modified_base 1, 2, 3, 4, 6, 7, 8, 9, 10, 11, 12, 13, 14, 15, 16, 17, 18, 19: /mod_base = "2'-hydroxy corresponding base"
ugaccaugacccugcccuctt

SEQ ID NO: 383 - DNA, 21 bp, Artificial sequence
  siRNAs to PCSK9
  modified_base 21: /mod_base = "5'-thio thymidine"
  modified_base 1..19: /mod_base = "2'-hydroxy corresponding base"
gggcagggucauggucacctt

SEQ ID NO: 384 - DNA, 21 bp, Artificial sequence
  siRNAs to PCSK9
  modified_base 21: /mod_base = "5'-thio thymidine"
  modified_base 1..19: /mod_base = "2'-hydroxy corresponding base"
ggugaccaugacccugccctt

SEQ ID NO: 385 - DNA, 21 bp, Artificial sequence
  siRNAs to PCSK9
  modified_base 4, 9, 10, 12, 15, 16, 18, 19: /mod_base = "2'-O-methyl corresponding base"
  modified_base 21: /mod_base = "5'-thio thymidine"
  modified_base 1, 2, 3, 5, 6, 7, 8, 11, 13, 14, 17: /mod_base = "2'-hydroxy corresponding base"
gggcagggucauggucacctt

SEQ ID NO: 386 - DNA, 21 bp, Artificial sequence
  siRNAs to PCSK9
  modified_base 7: /mod_base = "2'-O-methyl corresponding base"
  modified_base 21: /mod_base = "5'-thio thymidine"
  modified_base 1, 2, 3, 4, 5, 6, 8, 9, 10, 11, 12, 13, 14, 15, 16, 17, 18, 19: /mod_base = "2'-hydroxy corresponding base"
ggugaccaugacccugccctt

SEQ ID NO: 387 - DNA, 21 bp, Artificial sequence
  siRNAs to PCSK9
  modified_base 21: /mod_base = "5'-thio thymidine"
  modified_base 1..19: /mod_base = "2'-hydroxy corresponding base"
cagggucauggucaccgactt

SEQ ID NO: 388 - DNA, 21 bp, Artificial sequence
  siRNAs to PCSK9
  modified_base 21: /mod_base = "5'-thio thymidine"
  modified_base 1..19: /mod_base = "2'-hydroxy corresponding base"
gucggugaccaugacccugtt

SEQ ID NO: 389 - DNA, 21 bp, Artificial sequence
  siRNAs to PCSK9
  modified_base 1, 6, 7, 9, 12, 13, 15, 16, 19: /mod_base = "2'-O-methyl corresponding base"
  modified_base 21: /mod_base = "5'-thio thymidine"
  modified_base 2, 3, 4, 5, 8, 10, 11, 14, 17, 18: /mod_base = "2'-hydroxy corresponding base"
cagggucauggucaccgactt

SEQ ID NO: 390 - DNA, 21 bp, Artificial sequence
  siRNAs to PCSK9
  modified_base 10: /mod_base = "2'-O-methyl corresponding base"
  modified_base 21: /mod_base = "5'-thio thymidine"
  modified_base 1, 2, 3, 4, 5, 6, 7, 8, 9, 11, 12, 13, 14, 15, 16, 17, 18, 19: /mod_base = "2'-hydroxy corresponding base"
gucggugaccaugacccugtt

SEQ ID NO: 391 - DNA, 21 bp, Artificial sequence
  siRNAs to PCSK9
  modified_base 21: /mod_base = "5'-thio thymidine"
  modified_base 1..19: /mod_base = "2'-hydroxy corresponding base"
agggucauggucaccgacutt

SEQ ID NO: 392 - DNA, 21 bp, Artificial sequence
  siRNAs to PCSK9
  modified_base 21: /mod_base = "5'-thio thymidine"
  modified_base 1..19: /mod_base = "2'-hydroxy corresponding base"
agucggugaccaugacccutt

SEQ ID NO: 393 - DNA, 21 bp, Artificial sequence
  siRNAs to PCSK9
  modified_base 5, 6, 8, 11, 12, 14, 15, 18, 19: /mod_base = "2'-O-methyl corresponding base"
  modified_base 21: /mod_base = "5'-thio thymidine"
  modified_base 1, 2, 3, 4, 7, 9, 10, 13, 16, 17: /mod_base = "2'-hydroxy corresponding base"
agggucauggucaccgacutt

SEQ ID NO: 394 - DNA, 21 bp, Artificial sequence
  siRNAs to PCSK9
  modified_base 11: /mod_base = "2'-O-methyl corresponding base"
  modified_base 21: /mod_base = "5'-thio thymidine"
  modified_base 1, 2, 3, 4, 5, 6, 7, 8, 9, 10, 12, 13, 14, 15, 16, 17, 18, 19: /mod_base = "2'-hydroxy corresponding base"
agucggugaccaugacccutt

SEQ ID NO: 395 - DNA, 21 bp, Artificial sequence
  siRNAs to PCSK9
  modified_base 21: /mod_base = "5'-thio thymidine"
  modified_base 1..19: /mod_base = "2'-hydroxy corresponding base"
auggucaccgacuucgagatt

SEQ ID NO: 396 - DNA, 21 bp, Artificial sequence
  siRNAs to PCSK9
  modified_base 21: /mod_base = "5'-thio thymidine"
  modified_base 1..19: /mod_base = "2'-hydroxy corresponding base"
ucucgaagucggugaccautt

SEQ ID NO: 397 - DNA, 21 bp, Artificial sequence
  siRNAs to PCSK9
  modified_base 2, 5, 6, 8, 9, 12, 13, 14, 15: /mod_base = "2'-O-methyl corresponding base"
  modified_base 21: /mod_base = "5'-thio thymidine"
  modified_base 1, 3, 4, 7, 10, 11, 16, 17, 18, 19: /mod_base = "2'-hydroxy corresponding base"
auggucaccgacuucgagatt

SEQ ID NO: 398 - DNA, 21 bp, Artificial sequence
  siRNAs to PCSK9
  modified_base 17: /mod_base = "2'-O-methyl corresponding base"
  modified_base 21: /mod_base = "5'-thio thymidine"
  modified_base 1, 2, 3, 4, 5, 6, 7, 8, 9, 10, 11, 12, 13, 14, 15, 16, 18, 19: /mod_base = "2'-hydroxy corresponding base"
ucucgaagucggugaccautt

SEQ ID NO: 399 - DNA, 21 bp, Artificial sequence
  siRNAs to PCSK9
  modified_base 1..19: /mod_base = "2'-hydroxy corresponding base"
ccgacuucgagaaugugcctt

SEQ ID NO: 400 - DNA, 21 bp, Artificial sequence
  siRNAs to PCSK9
  modified_base 1..19: /mod_base = "2'-hydroxy corresponding base"
ggcacauucucgaagucggtt

SEQ ID NO: 401 - DNA, 21 bp, Artificial sequence
  siRNAs to PCSK9
  modified_base 1..19: /mod_base = "2'-hydroxy corresponding base"
ggaggacgggacccgcuuctt

SEQ ID NO: 402 - DNA, 21 bp, Artificial sequence
  siRNAs to PCSK9
  modified_base 1..19: /mod_base = "2'-hydroxy corresponding base"
gaagcgggucccguccucctt

SEQ ID NO: 403 - DNA, 21 bp, Artificial sequence
  siRNAs to PCSK9
  modified_base 21: /mod_base = "5'-thio thymidine"
  modified_base 1..19: /mod_base = "2'-hydroxy corresponding base"
cagcggccgggaugccggctt

SEQ ID NO: 404 - DNA, 21 bp, Artificial sequence
  siRNAs to PCSK9
  modified_base 21: /mod_base = "5'-thio thymidine"
  modified_base 1..19: /mod_base = "2'-hydroxy corresponding base"
gccggcaucccggccgcugtt

SEQ ID NO: 405 - DNA, 21 bp, Artificial sequence
  siRNAs to PCSK9
  modified_base 1, 4, 7, 8, 13, 15, 16, 19: /mod_base = "2'-O-methyl corresponding base"
  modified_base 21: /mod_base = "5'-thio thymidine"
  modified_base 2, 3, 5, 6, 9, 10, 11, 12, 14, 17, 18: /mod_base = "2'-hydroxy corresponding base"
cagcggccgggaugccggctt

SEQ ID NO: 406 - DNA, 21 bp, Artificial sequence
  siRNAs to PCSK9
  modified_base 6: /mod_base = "2'-O-methyl corresponding base"
  modified_base 21: /mod_base = "5'-thio thymidine"
  modified_base 1, 2, 3, 4, 5, 7, 8, 9, 10, 11, 12, 13, 14, 15, 16, 17, 18, 19: /mod_base = "2'-hydroxy corresponding base"
gccggcaucccggccgcugtt

SEQ ID NO: 407 - DNA, 21 bp, Artificial sequence
  siRNAs to PCSK9
  modified_base 1..19: /mod_base = "2'-hydroxy corresponding base"
gggugccagcaugcgcagctt

SEQ ID NO: 408 - DNA, 21 bp, Artificial sequence
  siRNAs to PCSK9
  modified_base 1..19: /mod_base = "2'-hydroxy corresponding base"
gcugcgcaugcuggcaccctt

SEQ ID NO: 409 - DNA, 21 bp, Artificial sequence
  siRNAs to PCSK9
  modified_base 21: /mod_base = "5'-thio thymidine"
  modified_base 1..19: /mod_base = "2'-hydroxy corresponding base"
ccugcgcgugcucaacugctt

SEQ ID NO: 410 - DNA, 21 bp, Artificial sequence
  siRNAs to PCSK9
  modified_base 21: /mod_base = "5'-thio thymidine"
  modified_base 1..19: /mod_base = "2'-hydroxy corresponding base"
gcaguugagcacgcgcaggtt

SEQ ID NO: 411 - DNA, 21 bp, Artificial sequence
  siRNAs to PCSK9
  modified_base 1, 2, 3, 5, 7, 9, 11, 12, 13, 16, 17, 19: /mod_base = "2'-O-methyl corresponding base"
  modified_base 21: /mod_base = "5'-thio thymidine"
  modified_base 4, 6, 8, 10, 14, 15, 18: /mod_base = "2'-hydroxy corresponding base"
ccugcgcgugcucaacugctt

SEQ ID NO: 412 - DNA, 21 bp, Artificial sequence
  siRNAs to PCSK9
  modified_base 2, 10, 16: /mod_base = "2'-O-methyl corresponding base"
  modified_base 21: /mod_base = "5'-thio thymidine"
  modified_base 1, 3, 4, 5, 6, 7, 8, 9, 11, 12, 13, 14, 15, 17, 18, 19: /mod_base = "2'-hydroxy corresponding base"
gcaguugagcacgcgcaggtt

SEQ ID NO: 413 - DNA, 21 bp, Artificial sequence
  siRNAs to PCSK9
  modified_base 21: /mod_base = "5'-thio thymidine"
  modified_base 1..19: /mod_base = "2'-hydroxy corresponding base"
ugcgcgugcucaacugccatt

SEQ ID NO: 414 - DNA, 21 bp, Artificial sequence
  siRNAs to PCSK9
  modified_base 21: /mod_base = "5'-thio thymidine"
  modified_base 1..19: /mod_base = "2'-hydroxy corresponding base"
uggcaguugagcacgcgcatt

SEQ ID NO: 415 - DNA, 21 bp, Artificial sequence
  siRNAs to PCSK9
  modified_base 1, 3, 5, 7, 9, 10, 11, 14, 15, 17, 18: /mod_base = "2'-O-methyl corresponding base"
  modified_base 21: /mod_base = "5'-thio thymidine"
  modified_base 2, 4, 6, 8, 12, 13, 16, 19: /mod_base = "2'-hydroxy corresponding base"
ugcgcgugcucaacugccatt

SEQ ID NO: 416 - DNA, 21 bp, Artificial sequence
  siRNAs to PCSK9
  modified_base 4, 12, 18: /mod_base = "2'-O-methyl corresponding base"
  modified_base 21: /mod_base = "5'-thio thymidine"
  modified_base 1, 2, 3, 5, 6, 7, 8, 9, 10, 11, 13, 14, 15, 16, 17, 19: /mod_base = "2'-hydroxy corresponding base"
uggcaguugagcacgcgcatt

SEQ ID NO: 417 - DNA, 21 bp, Artificial sequence
  siRNAs to PCSK9
  modified_base 21: /mod_base = "5'-thio thymidine"
  modified_base 1..19: /mod_base = "2'-hydroxy corresponding base"
cgcgugcucaacugccaagtt

SEQ ID NO: 418 - DNA, 21 bp, Artificial sequence
  siRNAs to PCSK9
  modified_base 21: /mod_base = "5'-thio thymidine"
  modified_base 1..19: /mod_base = "2'-hydroxy corresponding base"
cuuggcaguugagcacgcgtt

SEQ ID NO: 419 - DNA, 21 bp, Artificial sequence
  siRNAs to PCSK9
  modified_base 1, 3, 5, 7, 8, 9, 12, 13, 15, 16: /mod_base = "2'-O-methyl corresponding base"
  modified_base 21: /mod_base = "5'-thio thymidine"
  modified_base 2, 4, 6, 10, 11, 14, 17, 18, 19: /mod_base = "2'-hydroxy corresponding base"
cgcgugcucaacugccaagtt

SEQ ID NO: 420 - DNA, 21 bp, Artificial sequence
  siRNAs to PCSK9
  modified_base 6, 14: /mod_base = "2'-O-methyl corresponding base"
  modified_base 21: /mod_base = "5'-thio thymidine"
  modified_base 1, 2, 3, 4, 5, 7, 8, 9, 10, 11, 12, 13, 15, 16, 17, 18, 19: /mod_base = "2'-hydroxy corresponding base"
cuuggcaguugagcacgcgtt

SEQ ID NO: 421 - DNA, 21 bp, Artificial sequence
  siRNAs to PCSK9
  modified_base 21: /mod_base = "5'-thio thymidine"
  modified_base 1..19: /mod_base = "2'-hydroxy corresponding base"
cugccaagggaagggcacgtt

SEQ ID NO: 422 - DNA, 21 bp, Artificial sequence
  siRNAs to PCSK9
  modified_base 21: /mod_base = "5'-thio thymidine"
  modified_base 1..19: /mod_base = "2'-hydroxy corresponding base"
cgugcccuucccuuggcagtt

SEQ ID NO: 423 - DNA, 21 bp, Artificial sequence
  siRNAs to PCSK9
  modified_base 1, 2, 4, 5, 16, 18: /mod_base = "2'-O-methyl corresponding base"
  modified_base 21: /mod_base = "5'-thio thymidine"
  modified_base 3, 6, 7, 8, 9, 10, 11, 12, 13, 14, 15, 17, 19: /mod_base = "2'-hydroxy corresponding base"
cugccaagggaagggcacgtt

SEQ ID NO: 424 - DNA, 21 bp, Artificial sequence
  siRNAs to PCSK9
  modified_base 17: /mod_base = "2'-O-methyl corresponding base"
  modified_base 21: /mod_base = "5'-thio thymidine"
  modified_base 1, 2, 3, 4, 5, 6, 7, 8, 9, 10, 11, 12, 13, 14, 15, 16, 18, 19: /mod_base = "2'-hydroxy corresponding base"
cgugcccuucccuuggcagtt

SEQ ID NO: 425 - DNA, 21 bp, Artificial sequence
  siRNAs to PCSK9
  modified_base 1..19: /mod_base = "2'-hydroxy corresponding base"
caagggaagggcacgguuatt

SEQ ID NO: 426 - DNA, 21 bp, Artificial sequence
  siRNAs to PCSK9
  modified_base 1..19: /mod_base = "2'-hydroxy corresponding base"
uaaccgugcccuucccuugtt

SEQ ID NO: 427 - DNA, 21 bp, Artificial sequence
  siRNAs to PCSK9
  modified_base 1..19: /mod_base = "2'-hydroxy corresponding base"
aagggaagggcacgguuagtt

SEQ ID NO: 428 - DNA, 21 bp, Artificial sequence
  siRNAs to PCSK9
  modified_base 1..19: /mod_base = "2'-hydroxy corresponding base"
cuaaccgugcccuucccuutt

SEQ ID NO: 429 - DNA, 21 bp, Artificial sequence
  siRNAs to PCSK9
  modified_base 1..19: /mod_base = "2'-hydroxy corresponding base"
agggaagggcacgguuagctt

SEQ ID NO: 430 - DNA, 21 bp, Artificial sequence
  siRNAs to PCSK9
  modified_base 1..19: /mod_base = "2'-hydroxy corresponding base"
gcuaaccgugcccuucccutt

SEQ ID NO: 431 - DNA, 21 bp, Artificial sequence
  siRNAs to PCSK9
  modified_base 1..19: /mod_base = "2'-hydroxy corresponding base"
gggaagggcacgguuagcgtt

SEQ ID NO: 432 - DNA, 21 bp, Artificial sequence
  siRNAs to PCSK9
  modified_base 1..19: /mod_base = "2'-hydroxy corresponding base"
cgcuaaccgugcccuuccctt

SEQ ID NO: 433 - DNA, 21 bp, Artificial sequence
  siRNAs to PCSK9
  modified_base 1..19: /mod_base = "2'-hydroxy corresponding base"
ggaagggcacgguuagcggtt

SEQ ID NO: 434 - DNA, 21 bp, Artificial sequence
  siRNAs to PCSK9
  modified_base 1..19: /mod_base = "2'-hydroxy corresponding base"
ccgcuaaccgugcccuucctt

SEQ ID NO: 435 - DNA, 21 bp, Artificial sequence
  siRNAs to PCSK9
  modified_base 1..19: /mod_base = "2'-hydroxy corresponding base"
gaagggcacgguuagcggctt

SEQ ID NO: 436 - DNA, 21 bp, Artificial sequence
  siRNAs to PCSK9
  modified_base 1..19: /mod_base = "2'-hydroxy corresponding base"
gccgcuaaccgugcccuuctt

SEQ ID NO: 437 - DNA, 21 bp, Artificial sequence
  siRNAs to PCSK9
  modified_base 1..19: /mod_base = "2'-hydroxy corresponding base"
aagggcacgguuagcggcatt

SEQ ID NO: 438 - DNA, 21 bp, Artificial sequence
  siRNAs to PCSK9
  modified_base 1..19: /mod_base = "2'-hydroxy corresponding base"
ugccgcuaaccgugcccuutt

SEQ ID NO: 439 - DNA, 21 bp, Artificial sequence
  siRNAs to PCSK9
  modified_base 1..19: /mod_base = "2'-hydroxy corresponding base"
agggcacgguuagcggcactt

SEQ ID NO: 440 - DNA, 21 bp, Artificial sequence
  siRNAs to PCSK9
  modified_base 1..19: /mod_base = "2'-hydroxy corresponding base"
gugccgcuaaccgugcccutt

SEQ ID NO: 441 - DNA, 21 bp, Artificial sequence
  siRNAs to PCSK9
  modified_base 1..19: /mod_base = "2'-hydroxy corresponding base"
cacgguuagcggcacccuctt

SEQ ID NO: 442 - DNA, 21 bp, Artificial sequence
  siRNAs to PCSK9
  modified_base 1..19: /mod_base = "2'-hydroxy corresponding base"
gagggugccgcuaaccgugtt

SEQ ID NO: 443 - DNA, 21 bp, Artificial sequence
  siRNAs to PCSK9
  modified_base 1..19: /mod_base = "2'-hydroxy corresponding base"
acgguuagcggcacccucatt

SEQ ID NO: 444 - DNA, 21 bp, Artificial sequence
  siRNAs to PCSK9
  modified_base 1..19: /mod_base = "2'-hydroxy corresponding base"
ugagggugccgcuaaccgutt

SEQ ID NO: 445 - DNA, 21 bp, Artificial sequence
  siRNAs to PCSK9
  modified_base 1..19: /mod_base = "2'-hydroxy corresponding base"
guuagcggcacccucauagtt

SEQ ID NO: 446 - DNA, 21 bp, Artificial sequence
  siRNAs to PCSK9
  modified_base 1..19: /mod_base = "2'-hydroxy corresponding base"
cuaugagggugccgcuaactt

SEQ ID NO: 447 - DNA, 21 bp, Artificial sequence
  siRNAs to PCSK9
  modified_base 1..19: /mod_base = "2'-hydroxy corresponding base"
uuagcggcacccucauaggtt

SEQ ID NO: 448 - DNA, 21 bp, Artificial sequence
  siRNAs to PCSK9
  modified_base 1..19: /mod_base = "2'-hydroxy corresponding base"
ccuaugagggugccgcuaatt

SEQ ID NO: 449 - DNA, 21 bp, Artificial sequence
  siRNAs to PCSK9
  modified_base 21: /mod_base = "5'-thio thymidine"
  modified_base 1..19: /mod_base = "2'-hydroxy corresponding base"
gcggcacccucauaggccutt

SEQ ID NO: 450 - DNA, 21 bp, Artificial sequence
  siRNAs to PCSK9
  modified_base 21: /mod_base = "5'-thio thymidine"
  modified_base 1..19: /mod_base = "2'-hydroxy corresponding base"
aggccuaugagggugccgctt

SEQ ID NO: 451 - DNA, 21 bp, Artificial sequence
  siRNAs to PCSK9
  modified_base 21: /mod_base = "5'-thio thymidine"
  modified_base 1..19: /mod_base = "2'-hydroxy corresponding base"
gcacccucauaggccuggatt

SEQ ID NO: 452 - DNA, 21 bp, Artificial sequence
  siRNAs to PCSK9
  modified_base 21: /mod_base = "5'-thio thymidine"
  modified_base 1..19: /mod_base = "2'-hydroxy corresponding base"
uccaggccuaugagggugctt

SEQ ID NO: 453 - DNA, 21 bp, Artificial sequence
  siRNAs to PCSK9
  modified_base 21: /mod_base = "5'-thio thymidine"
  modified_base 1..19: /mod_base = "2'-hydroxy corresponding base"
ucauaggccuggaguuuautt

SEQ ID NO: 454 - DNA, 21 bp, Artificial sequence
  siRNAs to PCSK9
  modified_base 21: /mod_base = "5'-thio thymidine"
  modified_base 1..19: /mod_base = "2'-hydroxy corresponding base"
auaaacuccaggccuaugatt

SEQ ID NO: 455 - DNA, 21 bp, Artificial sequence
  siRNAs to PCSK9
  modified_base 21: /mod_base = "5'-thio thymidine"
  modified_base 1..19: /mod_base = "2'-hydroxy corresponding base"
ggccuggaguuuauucggatt

SEQ ID NO: 456 - DNA, 21 bp, Artificial sequence
  siRNAs to PCSK9
  modified_base 21: /mod_base = "5'-thio thymidine"
  modified_base 1..19: /mod_base = "2'-hydroxy corresponding base"
uccgaauaaacuccaggcctt

SEQ ID NO: 457 - DNA, 21 bp, Artificial sequence
  siRNAs to PCSK9
  modified_base 21: /mod_base = "5'-thio thymidine"
  modified_base 1..19: /mod_base = "2'-hydroxy corresponding base"
gccuggaguuuauucggaatt

SEQ ID NO: 458 - DNA, 21 bp, Artificial sequence
  siRNAs to PCSK9
  modified_base 21: /mod_base = "5'-thio thymidine"
  modified_base 1..19: /mod_base = "2'-hydroxy corresponding base"
uuccgaauaaacuccaggctt

SEQ ID NO: 459 - DNA, 21 bp, Artificial sequence
  siRNAs to PCSK9
  modified_base 2, 3, 4, 9, 10, 11, 13, 14, 15: /mod_base = "2'-O-methyl corresponding base"
  modified_base 21: /mod_base = "5'-thio thymidine"
  modified_base 1, 5, 6, 7, 8, 12, 16, 17, 18, 19: /mod_base = "2'-hydroxy corresponding base"
gccuggaguuuauucggaatt

SEQ ID NO: 460 - DNA, 21 bp, Artificial sequence
  siRNAs to PCSK9
  modified_base 8, 15: /mod_base = "2'-O-methyl corresponding base"
  modified_base 21: /mod_base = "5'-thio thymidine"
  modified_base 1, 2, 3, 4, 5, 6, 7, 9, 10, 11, 12, 13, 14, 16, 17, 18, 19: /mod_base = "2'-hydroxy corresponding base"
uuccgaauaaacuccaggctt

SEQ ID NO: 461 - DNA, 21 bp, Artificial sequence
  siRNAs to PCSK9
  modified_base 2, 3, 4, 9, 10, 11, 13, 14, 15: /mod_base = "2'-O-methyl corresponding base"
  modified_base 21: /mod_base = "5'-thio thymidine"
  modified_base 1, 5, 6, 7, 8, 12, 16, 17, 18, 19: /mod_base = "2'-hydroxy corresponding base"
gccuggaguuuauucggaatt

SEQ ID NO: 462 - DNA, 20 bp, Artificial sequence
  siRNAs to PCSK9
  modified_base 20: /mod_base = "5'-thio thymidine"
  modified_base 1..18: /mod_base = "2'-hydroxy corresponding base"
uuccgaauaacuccaggctt

SEQ ID NO: 463 - DNA, 21 bp, Artificial sequence
  siRNAs to PCSK9
  modified_base 21: /mod_base = "5'-thio thymidine"
  modified_base 1..19: /mod_base = "2'-hydroxy corresponding base"
cuggaguuuauucggaaaatt

SEQ ID NO: 464 - DNA, 21 bp, Artificial sequence
  siRNAs to PCSK9
  modified_base 21: /mod_base = "5'-thio thymidine"
  modified_base 1..19: /mod_base = "2'-hydroxy corresponding base"
uuuuccgaauaaacuccagtt

SEQ ID NO: 465 - DNA, 21 bp, Artificial sequence
  siRNAs to PCSK9
  modified_base 1, 2, 7, 8, 9, 11, 12, 13: /mod_base = "2'-O-methyl corresponding base"
  modified_base 21: /mod_base = "5'-thio thymidine"
  modified_base 3, 4, 5, 6, 10, 14, 15, 16, 17, 18, 19: /mod_base = "2'-hydroxy corresponding base"
cuggaguuuauucggaaaatt

SEQ ID NO: 466 - DNA, 21 bp, Artificial sequence
  siRNAs to PCSK9
  modified_base 10, 17: /mod_base = "2'-O-methyl corresponding base"
  modified_base 21: /mod_base = "5'-thio thymidine"
  modified_base 1, 2, 3, 4, 5, 6, 7, 8, 9, 11, 12, 13, 14, 15, 16, 18, 19: /mod_base = "2'-hydroxy corresponding base"
uuuuccgaauaaacuccagtt

SEQ ID NO: 467 - DNA, 21 bp, Artificial sequence
  siRNAs to PCSK9
  modified_base 21: /mod_base = "5'-thio thymidine"
  modified_base 1..19: /mod_base = "2'-hydroxy corresponding base"
ggaguuuauucggaaaagctt

SEQ ID NO: 468 - DNA, 21 bp, Artificial sequence
  siRNAs to PCSK9
  modified_base 21: /mod_base = "5'-thio thymidine"
  modified_base 1..19: /mod_base = "2'-hydroxy corresponding base"
gcuuuuccgaauaaacucctt

SEQ ID NO: 469 - DNA, 21 bp, Artificial sequence
  siRNAs to PCSK9
  modified_base 5, 6, 7, 9, 10, 11, 19: /mod_base = "2'-O-methyl corresponding base"
  modified_base 21: /mod_base = "5'-thio thymidine"
  modified_base 1, 2, 3, 4, 8, 12, 13, 14, 15, 16, 17, 18: /mod_base = "2'-hydroxy corresponding base"
ggaguuuauucggaaaagctt

SEQ ID NO: 470 - DNA, 21 bp, Artificial sequence
  siRNAs to PCSK9
  modified_base 12: /mod_base = "2'-O-methyl corresponding base"
  modified_base 21: /mod_base = "5'-thio thymidine"
  modified_base 1, 2, 3, 4, 5, 6, 7, 8, 9, 10, 11, 13, 14, 15, 16, 17, 18, 19: /mod_base = "2'-hydroxy corresponding base"
gcuuuuccgaauaaacucctt

SEQ ID NO: 471 - DNA, 21 bp, Artificial sequence
  siRNAs to PCSK9
  modified_base 21: /mod_base = "5'-thio thymidine"
  modified_base 1..19: /mod_base = "2'-hydroxy corresponding base"
gaguuuauucggaaaagcctt

SEQ ID NO: 472 - DNA, 21 bp, Artificial sequence
  siRNAs to PCSK9
  modified_base 21: /mod_base = "5'-thio thymidine"
  modified_base 1..19: /mod_base = "2'-hydroxy corresponding base"
ggcuuuuccgaauaaacuctt

SEQ ID NO: 473 - DNA, 21 bp, Artificial sequence
  siRNAs to PCSK9
  modified_base 4, 5, 6, 8, 9, 10, 18, 19: /mod_base = "2'-O-methyl corresponding base"
  modified_base 21: /mod_base = "5'-thio thymidine"
  modified_base 1, 2, 3, 7, 11, 12, 13, 14, 15, 16, 17: /mod_base = "2'-hydroxy corresponding base"
gaguuuauucggaaaagcctt

SEQ ID NO: 474 - DNA, 21 bp, Artificial sequence
  siRNAs to PCSK9
  modified_base 13: /mod_base = "2'-O-methyl corresponding base"
  modified_base 21: /mod_base = "5'-thio thymidine"
  modified_base 1, 2, 3, 4, 5, 6, 7, 8, 9, 10, 11, 12, 14, 15, 16, 17, 18, 19: /mod_base = "2'-hydroxy corresponding base"
ggcuuuuccgaauaaacuctt

SEQ ID NO: 475 - DNA, 21 bp, Artificial sequence
  siRNAs to PCSK9
  modified_base 21: /mod_base = "5'-thio thymidine"
  modified_base 1..19: /mod_base = "2'-hydroxy corresponding base"
uuauucggaaaagccagcutt

SEQ ID NO: 476 - DNA, 21 bp, Artificial sequence
  siRNAs to PCSK9
  modified_base 21: /mod_base = "5'-thio thymidine"
  modified_base 1..19: /mod_base = "2'-hydroxy corresponding base"
agcuggcuuuuccgaauaatt

SEQ ID NO: 477 - DNA, 21 bp, Artificial sequence
  siRNAs to PCSK9
  modified_base 1, 2, 4, 5, 6, 14, 15, 18, 19: /mod_base = "2'-O-methyl corresponding base"
  modified_base 21: /mod_base = "5'-thio thymidine"
  modified_base 3, 7, 8, 9, 10, 11, 12, 13, 16, 17: /mod_base = "2'-hydroxy corresponding base"
uuauucggaaaagccagcutt

SEQ ID NO: 478 - DNA, 21 bp, Artificial sequence
  siRNAs to PCSK9
  modified_base 17: /mod_base = "2'-O-methyl corresponding base"
  modified_base 21: /mod_base = "5'-thio thymidine"
  modified_base 1, 2, 3, 4, 5, 6, 7, 8, 9, 10, 11, 12, 13, 14, 15, 16, 18, 19: /mod_base = "2'-hydroxy corresponding base"
agcuggcuuuuccgaauaatt

SEQ ID NO: 479 - DNA, 21 bp, Artificial sequence
  siRNAs to PCSK9
  modified_base 21: /mod_base = "5'-thio thymidine"
  modified_base 1..19: /mod_base = "2'-hydroxy corresponding base"
cccuggcggguggguacagtt

SEQ ID NO: 480 - DNA, 21 bp, Artificial sequence
  siRNAs to PCSK9
  modified_base 21: /mod_base = "5'-thio thymidine"
  modified_base 1..19: /mod_base = "2'-hydroxy corresponding base"
cuguacccacccgccagggtt

SEQ ID NO: 481 - DNA, 21 bp, Artificial sequence
  siRNAs to PCSK9
  modified_base 1, 2, 3, 4, 7, 11, 15, 17: /mod_base = "2'-O-methyl corresponding base"
  modified_base 21: /mod_base = "5'-thio thymidine"
  modified_base 5, 6, 8, 9, 10, 12, 13, 14, 16, 18, 19: /mod_base = "2'-hydroxy corresponding base"
cccuggcggguggguacagtt

SEQ ID NO: 482 - DNA, 21 bp, Artificial sequence
  siRNAs to PCSK9
  modified_base 4, 8, 15: /mod_base = "2'-O-methyl corresponding base"
  modified_base 21: /mod_base = "5'-thio thymidine"
  modified_base 1, 2, 3, 5, 6, 7, 9, 10, 11, 12, 13, 14, 16, 17, 18, 19: /mod_base = "2'-hydroxy corresponding base"
cuguacccacccgccagggtt

SEQ ID NO: 483 - DNA, 21 bp, Artificial sequence
  siRNAs to PCSK9
  modified_base 1..19: /mod_base = "2'-hydroxy corresponding base"
ccuggcggguggguacagctt

SEQ ID NO: 484 - DNA, 21 bp, Artificial sequence
  siRNAs to PCSK9
  modified_base 1..19: /mod_base = "2'-hydroxy corresponding base"
gcuguacccacccgccaggtt

SEQ ID NO: 485 - DNA, 21 bp, Artificial sequence
  siRNAs to PCSK9
  modified_base 21: /mod_base = "5'-thio thymidine"
  modified_base 1..19: /mod_base = "2'-hydroxy corresponding base"
uggcggguggguacagccgtt

SEQ ID NO: 486 - DNA, 21 bp, Artificial sequence
  siRNAs to PCSK9
  modified_base 21: /mod_base = "5'-thio thymidine"
  modified_base 1..19: /mod_base = "2'-hydroxy corresponding base"
cggcuguacccacccgccatt

SEQ ID NO: 487 - DNA, 21 bp, Artificial sequence
  siRNAs to PCSK9
  modified_base 1, 4, 8, 12, 14, 17, 18: /mod_base = "2'-O-methyl corresponding base"
  modified_base 21: /mod_base = "5'-thio thymidine"
  modified_base 2, 3, 5, 6, 7, 9, 10, 11, 13, 15, 16, 19: /mod_base = "2'-hydroxy corresponding base"
uggcggguggguacagccgtt

SEQ ID NO: 488 - DNA, 21 bp, Artificial sequence
  siRNAs to PCSK9
  modified_base 7, 11, 18: /mod_base = "2'-O-methyl corresponding base"
  modified_base 21: /mod_base = "5'-thio thymidine"
  modified_base 1, 2, 3, 4, 5, 6, 8, 9, 10, 12, 13, 14, 15, 16, 17, 19: /mod_base = "2'-hydroxy corresponding base"
cggcuguacccacccgccatt

SEQ ID NO: 489 - DNA, 21 bp, Artificial sequence
  siRNAs to PCSK9
  modified_base 1..19: /mod_base = "2'-hydroxy corresponding base"
ggcggguggguacagccgctt

SEQ ID NO: 490 - DNA, 21 bp, Artificial sequence
  siRNAs to PCSK9
  modified_base 1..19: /mod_base = "2'-hydroxy corresponding base"
gcggcuguacccacccgcctt

SEQ ID NO: 491 - DNA, 21 bp, Artificial sequence
  siRNAs to PCSK9
  modified_base 1..19: /mod_base = "2'-hydroxy corresponding base"
gguggguacagccgcgucctt

SEQ ID NO: 492 - DNA, 21 bp, Artificial sequence
  siRNAs to PCSK9
  modified_base 1..19: /mod_base = "2'-hydroxy corresponding base"
ggacgcggcuguacccacctt

SEQ ID NO: 493 - DNA, 21 bp, Artificial sequence
  siRNAs to PCSK9
  modified_base 1..19: /mod_base = "2'-hydroxy corresponding base"
uggguacagccgcguccuctt

SEQ ID NO: 494 - DNA, 21 bp, Artificial sequence
  siRNAs to PCSK9
  modified_base 1..19: /mod_base = "2'-hydroxy corresponding base"
gaggacgcggcuguacccatt

SEQ ID NO: 495 - DNA, 21 bp, Artificial sequence
  siRNAs to PCSK9
  modified_base 1..19: /mod_base = "2'-hydroxy corresponding base"
gccgcguccucaacgccgctt

SEQ ID NO: 496 - DNA, 21 bp, Artificial sequence
  siRNAs to PCSK9
  modified_base 1..19: /mod_base = "2'-hydroxy corresponding base"
gcggcguugaggacgcggctt

SEQ ID NO: 497 - DNA, 21 bp, Artificial sequence
  siRNAs to PCSK9
  modified_base 1..19: /mod_base = "2'-hydroxy corresponding base"
ccgcguccucaacgccgcctt

SEQ ID NO: 498 - DNA, 21 bp, Artificial sequence
  siRNAs to PCSK9
  modified_base 1..19: /mod_base = "2'-hydroxy corresponding base"
ggcggcguugaggacgcggtt

SEQ ID NO: 499 - DNA, 21 bp, Artificial sequence
  siRNAs to PCSK9
  modified_base 21: /mod_base = "5'-thio thymidine"
  modified_base 1..19: /mod_base = "2'-hydroxy corresponding base"
gucgugcuggucaccgcugtt

SEQ ID NO: 500 - DNA, 21 bp, Artificial sequence
  siRNAs to PCSK9
  modified_base 21: /mod_base = "5'-thio thymidine"
  modified_base 1..19: /mod_base = "2'-hydroxy corresponding base"
cagcggugaccagcacgactt

SEQ ID NO: 501 - DNA, 21 bp, Artificial sequence
  siRNAs to PCSK9
  modified_base 2, 3, 5, 7, 8, 11, 12, 14, 15, 17, 18: /mod_base = "2'-O-methyl corresponding base"
  modified_base 21: /mod_base = "5'-thio thymidine"
  modified_base 1, 4, 6, 9, 10, 13, 16, 19: /mod_base = "2'-hydroxy corresponding base"
gucgugcuggucaccgcugtt

SEQ ID NO: 502 - DNA, 21 bp, Artificial sequence
  siRNAs to PCSK9
  modified_base 1, 11, 14: /mod_base = "2'-O-methyl corresponding base"
  modified_base 21: /mod_base = "5'-thio thymidine"
  modified_base 2, 3, 4, 5, 6, 7, 8, 9, 10, 12, 13, 15, 16, 17, 18, 19: /mod_base = "2'-hydroxy corresponding base"
cagcggugaccagcacgactt

SEQ ID NO: 503 - DNA, 21 bp, Artificial sequence
  siRNAs to PCSK9
  modified_base 21: /mod_base = "5'-thio thymidine"
  modified_base 1..19: /mod_base = "2'-hydroxy corresponding base"
ucgugcuggucaccgcugctt

SEQ ID NO: 504 - DNA, 21 bp, Artificial sequence
  siRNAs to PCSK9
  modified_base 21: /mod_base = "5'-thio thymidine"
  modified_base 1..19: /mod_base = "2'-hydroxy corresponding base"
gcagcggugaccagcacgatt

SEQ ID NO: 505 - DNA, 21 bp, Artificial sequence
  siRNAs to PCSK9
  modified_base 1, 2, 4, 6, 7, 10, 11, 13, 14, 16, 17, 19: /mod_base = "2'-O-methyl corresponding base"
  modified_base 21: /mod_base = "5'-thio thymidine"
  modified_base 3, 5, 8, 9, 12, 15, 18: /mod_base = "2'-hydroxy corresponding base"
ucgugcuggucaccgcugctt

SEQ ID NO: 506 - DNA, 21 bp, Artificial sequence
  siRNAs to PCSK9
  modified_base 2, 12, 15: /mod_base = "2'-O-methyl corresponding base"
  modified_base 21: /mod_base = "5'-thio thymidine"
  modified_base 1, 3, 4, 5, 6, 7, 8, 9, 10, 11, 13, 14, 16, 17, 18, 19: /mod_base = "2'-hydroxy corresponding base"
gcagcggugaccagcacgatt

SEQ ID NO: 507 - DNA, 21 bp, Artificial sequence
  siRNAs to PCSK9
  modified_base 21: /mod_base = "5'-thio thymidine"
  modified_base 1..19: /mod_base = "2'-hydroxy corresponding base"
uggucaccgcugccggcaatt

SEQ ID NO: 508 - DNA, 21 bp, Artificial sequence
  siRNAs to PCSK9
  modified_base 21: /mod_base = "5'-thio thymidine"
  modified_base 1..19: /mod_base = "2'-hydroxy corresponding base"
uugccggcagcggugaccatt

SEQ ID NO: 509 - DNA, 21 bp, Artificial sequence
  siRNAs to PCSK9
  modified_base 1, 4, 5, 7, 8, 10, 11, 13, 14, 17: /mod_base = "2'-O-methyl corresponding base"
  modified_base 21: /mod_base = "5'-thio thymidine"
  modified_base 2, 3, 6, 9, 12, 15, 16, 18, 19: /mod_base = "2'-hydroxy corresponding base"
uggucaccgcugccggcaatt

SEQ ID NO: 510 - DNA, 21 bp, Artificial sequence
  siRNAs to PCSK9
  modified_base 8, 18: /mod_base = "2'-O-methyl corresponding base"
  modified_base 21: /mod_base = "5'-thio thymidine"
  modified_base 1, 2, 3, 4, 5, 6, 7, 9, 10, 11, 12, 13, 14, 15, 16, 17, 19: /mod_base = "2'-hydroxy corresponding base"
uugccggcagcggugaccatt

SEQ ID NO: 511 - DNA, 21 bp, Artificial sequence
  siRNAs to PCSK9
  modified_base 21: /mod_base = "5'-thio thymidine"
  modified_base 1..19: /mod_base = "2'-hydroxy corresponding base"
ggucaccgcugccggcaactt

SEQ ID NO: 512 - DNA, 21 bp, Artificial sequence
  siRNAs to PCSK9
  modified_base 21: /mod_base = "5'-thio thymidine"
  modified_base 1..19: /mod_base = "2'-hydroxy corresponding base"
guugccggcagcggugacctt

SEQ ID NO: 513 - DNA, 21 bp, Artificial sequence
  siRNAs to PCSK9
  modified_base 3, 4, 6, 7, 9, 10, 12, 13, 16, 19: /mod_base = "2'-O-methyl corresponding base"
  modified_base 21: /mod_base = "5'-thio thymidine"
  modified_base 1, 2, 5, 8, 11, 14, 15, 17, 18: /mod_base = "2'-hydroxy corresponding base"
ggucaccgcugccggcaactt

SEQ ID NO: 514 - DNA, 21 bp, Artificial sequence
  siRNAs to PCSK9
  modified_base 9: /mod_base = "2'-O-methyl corresponding base"
  modified_base 21: /mod_base = "5'-thio thymidine"
  modified_base 1, 2, 3, 4, 5, 6, 7, 8, 10, 11, 12, 13, 14, 15, 16, 17, 18, 19: /mod_base = "2'-hydroxy corresponding base"
guugccggcagcggugacctt

SEQ ID NO: 515 - DNA, 21 bp, Artificial sequence
  siRNAs to PCSK9
  modified_base 21: /mod_base = "5'-thio thymidine"
  modified_base 1..19: /mod_base = "2'-hydroxy corresponding base"
caccgcugccggcaacuuctt

SEQ ID NO: 516 - DNA, 21 bp, Artificial sequence
  siRNAs to PCSK9
  modified_base 21: /mod_base = "5'-thio thymidine"
  modified_base 1..19: /mod_base = "2'-hydroxy corresponding base"
gaaguugccggcagcggugtt

SEQ ID NO: 517 - DNA, 21 bp, Artificial sequence
  siRNAs to PCSK9
  modified_base 1, 3, 4, 6, 7, 9, 10, 13, 16, 17, 18, 19: /mod_base = "2'-O-methyl corresponding base"
  modified_base 21: /mod_base = "5'-thio thymidine"
  modified_base 2, 5, 8, 11, 12, 14, 15: /mod_base = "2'-hydroxy corresponding base"
caccgcugccggcaacuuctt

SEQ ID NO: 518 - DNA, 21 bp, Artificial sequence
  siRNAs to PCSK9
  modified_base 12: /mod_base = "2'-O-methyl corresponding base"
  modified_base 21: /mod_base = "5'-thio thymidine"
  modified_base 1, 2, 3, 4, 5, 6, 7, 8, 9, 10, 11, 13, 14, 15, 16, 17, 18, 19: /mod_base = "2'-hydroxy corresponding base"
gaaguugccggcagcggugtt

SEQ ID NO: 519 - DNA, 21 bp, Artificial sequence
  siRNAs to PCSK9
  modified_base 21: /mod_base = "5'-thio thymidine"
  modified_base 1..19: /mod_base = "2'-hydroxy corresponding base"
ccgcugccggcaacuuccgtt

SEQ ID NO: 520 - DNA, 21 bp, Artificial sequence
  siRNAs to PCSK9
  modified_base 21: /mod_base = "5'-thio thymidine"
  modified_base 1..19: /mod_base = "2'-hydroxy corresponding base"
cggaaguugccggcagcggtt

SEQ ID NO: 521 - DNA, 21 bp, Artificial sequence
  siRNAs to PCSK9
  modified_base 1, 2, 4, 5, 7, 8, 11, 14, 15, 16, 17, 18: /mod_base = "2'-O-methyl corresponding base"
  modified_base 21: /mod_base = "5'-thio thymidine"
  modified_base 3, 6, 9, 10, 12, 13, 19: /mod_base = "2'-hydroxy corresponding base"
ccgcugccggcaacuuccgtt

SEQ ID NO: 522 - DNA, 21 bp, Artificial sequence
  siRNAs to PCSK9
  modified_base 14: /mod_base = "2'-O-methyl corresponding base"
  modified_base 21: /mod_base = "5'-thio thymidine"
  modified_base 1, 2, 3, 4, 5, 6, 7, 8, 9, 10, 11, 12, 13, 15, 16, 17, 18, 19: /mod_base = "2'-hydroxy corresponding base"
cggaaguugccggcagcggtt

SEQ ID NO: 523 - DNA, 21 bp, Artificial sequence
  siRNAs to PCSK9
  modified_base 21: /mod_base = "5'-thio thymidine"
  modified_base 1..19: /mod_base = "2'-hydroxy corresponding base"
cgcugccggcaacuuccggtt

SEQ ID NO: 524 - DNA, 21 bp, Artificial sequence
  siRNAs to PCSK9
  modified_base 21: /mod_base = "5'-thio thymidine"
  modified_base 1..19: /mod_base = "2'-hydroxy corresponding base"
ccggaaguugccggcagcgtt

SEQ ID NO: 525 - DNA, 21 bp, Artificial sequence
  siRNAs to PCSK9
  modified_base 1, 3, 4, 6, 7, 10, 13, 14, 15, 16, 17: /mod_base = "2'-O-methyl corresponding base"
  modified_base 21: /mod_base = "5'-thio thymidine"
  modified_base 2, 5, 8, 9, 11, 12, 18, 19: /mod_base = "2'-hydroxy corresponding base"
cgcugccggcaacuuccggtt

SEQ ID NO: 526 - DNA, 21 bp, Artificial sequence
  siRNAs to PCSK9
  modified_base 15: /mod_base = "2'-O-methyl corresponding base"
  modified_base 21: /mod_base = "5'-thio thymidine"
  modified_base 1, 2, 3, 4, 5, 6, 7, 8, 9, 10, 11, 12, 13, 14, 16, 17, 18, 19: /mod_base = "2'-hydroxy corresponding base"
ccggaaguugccggcagcgtt

SEQ ID NO: 527 - DNA, 21 bp, Artificial sequence
  siRNAs to PCSK9
  modified_base 21: /mod_base = "5'-thio thymidine"
  modified_base 1..19: /mod_base = "2'-hydroxy corresponding base"
gcugccggcaacuuccgggtt

SEQ ID NO: 528 - DNA, 21 bp, Artificial sequence
  siRNAs to PCSK9
  modified_base 21: /mod_base = "5'-thio thymidine"
  modified_base 1..19: /mod_base = "2'-hydroxy corresponding base"
cccggaaguugccggcagctt

SEQ ID NO: 529 - DNA, 21 bp, Artificial sequence
  siRNAs to PCSK9
  modified_base 2, 3, 5, 6, 9, 12, 13, 14, 15, 16: /mod_base = "2'-O-methyl corresponding base"
  modified_base 21: /mod_base = "5'-thio thymidine"
  modified_base 1, 4, 7, 8, 10, 11, 17, 18, 19: /mod_base = "2'-hydroxy corresponding base"
gcugccggcaacuuccgggtt

SEQ ID NO: 530 - DNA, 21 bp, Artificial sequence
  siRNAs to PCSK9
  modified_base 16: /mod_base = "2'-O-methyl corresponding base"
  modified_base 21: /mod_base = "5'-thio thymidine"
  modified_base 1, 2, 3, 4, 5, 6, 7, 8, 9, 10, 11, 12, 13, 14, 15, 17, 18, 19: /mod_base = "2'-hydroxy corresponding base"
cccggaaguugccggcagctt

SEQ ID NO: 531 - DNA, 21 bp, Artificial sequence
  siRNAs to PCSK9
  modified_base 21: /mod_base = "5'-thio thymidine"
  modified_base 1..19: /mod_base = "2'-hydroxy corresponding base"
cggcaacuuccgggacgautt

SEQ ID NO: 532 - DNA, 21 bp, Artificial sequence
  siRNAs to PCSK9
  modified_base 21: /mod_base = "5'-thio thymidine"
  modified_base 1..19: /mod_base = "2'-hydroxy corresponding base"
aucgucccggaaguugccgtt

SEQ ID NO: 533 - DNA, 21 bp, Artificial sequence
  siRNAs to PCSK9
  modified_base 1, 4, 7, 8, 9, 10, 11, 16, 19: /mod_base = "2'-O-methyl corresponding base"
  modified_base 21: /mod_base = "5'-thio thymidine"
  modified_base 2, 3, 5, 6, 12, 13, 14, 15, 17, 18: /mod_base = "2'-hydroxy corresponding base"
cggcaacuuccgggacgautt

SEQ ID NO: 534 - DNA, 21 bp, Artificial sequence
  siRNAs to PCSK9
  modified_base 21: /mod_base = "5'-thio thymidine"
  modified_base 1..19: /mod_base = "2'-hydroxy corresponding base"
aucgucccggaaguugccgtt

SEQ ID NO: 535 - DNA, 21 bp, Artificial sequence
  siRNAs to PCSK9
  modified_base 21: /mod_base = "5'-thio thymidine"
  modified_base 1..19: /mod_base = "2'-hydroxy corresponding base"
ggcaacuuccgggacgaugtt

SEQ ID NO: 536 - DNA, 21 bp, Artificial sequence
  siRNAs to PCSK9
  modified_base 21: /mod_base = "5'-thio thymidine"
  modified_base 1..19: /mod_base = "2'-hydroxy corresponding base"
caucgucccggaaguugcctt

SEQ ID NO: 537 - DNA, 21 bp, Artificial sequence
  siRNAs to PCSK9
  modified_base 3, 6, 7, 8, 9, 10, 15, 18: /mod_base = "2'-O-methyl corresponding base"
  modified_base 21: /mod_base = "5'-thio thymidine"
  modified_base 1, 2, 4, 5, 11, 12, 13, 14, 16, 17, 19: /mod_base = "2'-hydroxy corresponding base"
ggcaacuuccgggacgaugtt

SEQ ID NO: 538 - DNA, 21 bp, Artificial sequence
  siRNAs to PCSK9
  modified_base 1: /mod_base = "2'-O-methyl corresponding base"
  modified_base 21: /mod_base = "5'-thio thymidine"
  modified_base 2..19: /mod_base = "2'-hydroxy corresponding base"
caucgucccggaaguugcctt

SEQ ID NO: 539 - DNA, 21 bp, Artificial sequence
  siRNAs to PCSK9
  modified_base 21: /mod_base = "5'-thio thymidine"
  modified_base 1..19: /mod_base = "2'-hydroxy corresponding base"
uuccgggacgaugccugcctt

SEQ ID NO: 540 - DNA, 21 bp, Artificial sequence
  siRNAs to PCSK9
  modified_base 21: /mod_base = "5'-thio thymidine"
  modified_base 1..19: /mod_base = "2'-hydroxy corresponding base"
ggcaggcaucgucccggaatt

SEQ ID NO: 541 - DNA, 21 bp, Artificial sequence
  siRNAs to PCSK9
  modified_base 1, 2, 3, 4, 9, 12, 14, 15, 16, 18, 19: /mod_base = "2'-O-methyl corresponding base"
  modified_base 21: /mod_base = "5'-thio thymidine"
  modified_base 5, 6, 7, 8, 10, 11, 13, 17: /mod_base = "2'-hydroxy corresponding base"
uuccgggacgaugccugcctt

SEQ ID NO: 542 - DNA, 21 bp, Artificial sequence
  siRNAs to PCSK9
  modified_base 3, 7: /mod_base = "2'-O-methyl corresponding base"
  modified_base 21: /mod_base = "5'-thio thymidine"
  modified_base 1, 2, 4, 5, 6, 8, 9, 10, 11, 12, 13, 14, 15, 16, 17, 18, 19: /mod_base = "2'-hydroxy corresponding base"
ggcaggcaucgucccggaatt

SEQ ID NO: 543 - DNA, 21 bp, Artificial sequence
  siRNAs to PCSK9
  modified_base 21: /mod_base = "5'-thio thymidine"
  modified_base 1..19: /mod_base = "2'-hydroxy corresponding base"
ggacgaugccugccucuactt

SEQ ID NO: 544 - DNA, 21 bp, Artificial sequence
  siRNAs to PCSK9
  modified_base 21: /mod_base = "5'-thio thymidine"
  modified_base 1..19: /mod_base = "2'-hydroxy corresponding base"
guagaggcaggcaucgucctt

SEQ ID NO: 545 - DNA, 21 bp, Artificial sequence
  siRNAs to PCSK9
  modified_base 21: /mod_base = "5'-thio thymidine"
  modified_base 1..19: /mod_base = "2'-hydroxy corresponding base"
ggacgaugccugccucuactt

SEQ ID NO: 546 - DNA, 21 bp, Artificial sequence
  siRNAs to PCSK9
  modified_base 21: /mod_base = "5'-thio thymidine"
  modified_base 1..19: /mod_base = "2'-hydroxy corresponding base"
guagaggcaggcaucgucctt

SEQ ID NO: 547 - DNA, 21 bp, Artificial sequence
  siRNAs to PCSK9
  modified_base 4, 7, 9, 10, 11, 13, 14, 15, 16, 17, 19: /mod_base = "2'-O-methyl corresponding base"
  modified_base 21: /mod_base = "5'-thio thymidine"
  modified_base 1, 2, 3, 5, 6, 8, 12, 18: /mod_base = "2'-hydroxy corresponding base"
ggacgaugccugccucuactt

SEQ ID NO: 548 - DNA, 21 bp, Artificial sequence
  siRNAs to PCSK9
  modified_base 2, 8, 12: /mod_base = "2'-O-methyl corresponding base"
  modified_base 21: /mod_base = "5'-thio thymidine"
  modified_base 1, 3, 4, 5, 6, 7, 9, 10, 11, 13, 14, 15, 16, 17, 18, 19: /mod_base = "2'-hydroxy corresponding base"
guagaggcaggcaucgucctt

SEQ ID NO: 549 - DNA, 21 bp, Artificial sequence
  siRNAs to PCSK9
  modified_base 1..19: /mod_base = "2'-hydroxy corresponding base"
gcucccgaggucaucacagtt

SEQ ID NO: 550 - DNA, 21 bp, Artificial sequence
  siRNAs to PCSK9
  modified_base 1..19: /mod_base = "2'-hydroxy corresponding base"
cugugaugaccucgggagctt

SEQ ID NO: 551 - DNA, 21 bp, Artificial sequence
  siRNAs to PCSK9
  modified_base 1..19: /mod_base = "2'-hydroxy corresponding base"
cucccgaggucaucacagutt

SEQ ID NO: 552 - DNA, 21 bp, Artificial sequence
  siRNAs to PCSK9
  modified_base 1..19: /mod_base = "2'-hydroxy corresponding base"
acugugaugaccucgggagtt

SEQ ID NO: 553 - DNA, 21 bp, Artificial sequence
  siRNAs to PCSK9
  modified_base 1..19: /mod_base = "2'-hydroxy corresponding base"
ucccgaggucaucacaguutt

SEQ ID NO: 554 - DNA, 21 bp, Artificial sequence
  siRNAs to PCSK9
  modified_base 1..19: /mod_base = "2'-hydroxy corresponding base"
aacugugaugaccucgggatt

SEQ ID NO: 555 - DNA, 21 bp, Artificial sequence
  siRNAs to PCSK9
  modified_base 1..19: /mod_base = "2'-hydroxy corresponding base"
ccaagaccagccggugacctt

SEQ ID NO: 556 - DNA, 21 bp, Artificial sequence
  siRNAs to PCSK9
  modified_base 1..19: /mod_base = "2'-hydroxy corresponding base"
ggucaccggcuggucuuggtt

SEQ ID NO: 557 - DNA, 21 bp, Artificial sequence
  siRNAs to PCSK9
  modified_base 1..19: /mod_base = "2'-hydroxy corresponding base"
caagaccagccggugaccctt

SEQ ID NO: 558 - DNA, 21 bp, Artificial sequence
  siRNAs to PCSK9
  modified_base 1..19: /mod_base = "2'-hydroxy corresponding base"
gggucaccggcuggucuugtt

SEQ ID NO: 559 - DNA, 21 bp, Artificial sequence
  siRNAs to PCSK9
  modified_base 21: /mod_base = "5'-thio thymidine"
  modified_base 1..19: /mod_base = "2'-hydroxy corresponding base"
accaacuuuggccgcugugtt

SEQ ID NO: 560 - DNA, 21 bp, Artificial sequence
  siRNAs to PCSK9
  modified_base 21: /mod_base = "5'-thio thymidine"
  modified_base 1..19: /mod_base = "2'-hydroxy corresponding base"
cacagcggccaaaguuggutt

SEQ ID NO: 561 - DNA, 21 bp, Artificial sequence
  siRNAs to PCSK9
  modified_base 2, 3, 6, 7, 8, 9, 12, 13, 15, 16, 18: /mod_base = "2'-O-methyl corresponding base"
  modified_base 21: /mod_base = "5'-thio thymidine"
  modified_base 1, 4, 5, 10, 11, 14, 17, 19: /mod_base = "2'-hydroxy corresponding base"
accaacuuuggccgcugugtt

SEQ ID NO: 562 - DNA, 21 bp, Artificial sequence
  siRNAs to PCSK9
  modified_base 1, 3, 10: /mod_base = "2'-O-methyl corresponding base"
  modified_base 21: /mod_base = "5'-thio thymidine"
  modified_base 2, 4, 5, 6, 7, 8, 9, 11, 12, 13, 14, 15, 16, 17, 18, 19: /mod_base = "2'-hydroxy corresponding base"
cacagcggccaaaguuggutt

SEQ ID NO: 563 - DNA, 21 bp, Artificial sequence
  siRNAs to PCSK9
  modified_base 21: /mod_base = "5'-thio thymidine"
  modified_base 1..19: /mod_base = "2'-hydroxy corresponding base"
caacuuuggccgcugugugtt

SEQ ID NO: 564 - DNA, 21 bp, Artificial sequence
  siRNAs to PCSK9
  modified_base 21: /mod_base = "5'-thio thymidine"
  modified_base 1..19: /mod_base = "2'-hydroxy corresponding base"
cacacagcggccaaaguugtt

SEQ ID NO: 565 - DNA, 21 bp, Artificial sequence
  siRNAs to PCSK9
  modified_base 1, 4, 5, 6, 7, 10, 11, 13, 14, 16, 18: /mod_base = "2'-O-methyl corresponding base"
  modified_base 21: /mod_base = "5'-thio thymidine"
  modified_base 2, 3, 8, 9, 12, 15, 17, 19: /mod_base = "2'-hydroxy corresponding base"
caacuuuggccgcugugugtt

SEQ ID NO: 566 - DNA, 21 bp, Artificial sequence
  siRNAs to PCSK9
  modified_base 1, 3, 5, 12: /mod_base = "2'-O-methyl corresponding base"
  modified_base 21: /mod_base = "5'-thio thymidine"
  modified_base 2, 4, 6, 7, 8, 9, 10, 11, 13, 14, 15, 16, 17, 18, 19: /mod_base = "2'-hydroxy corresponding base"
cacacagcggccaaaguugtt

SEQ ID NO: 567 - DNA, 21 bp, Artificial sequence
  siRNAs to PCSK9
  modified_base 21: /mod_base = "5'-thio thymidine"
  modified_base 1..19: /mod_base = "2'-hydroxy corresponding base"
cgcuguguggaccucuuugtt

SEQ ID NO: 568 - DNA, 21 bp, Artificial sequence
  siRNAs to PCSK9
  modified_base 21: /mod_base = "5'-thio thymidine"
  modified_base 1..19: /mod_base = "2'-hydroxy corresponding base"
caaagagguccacacagcgtt

SEQ ID NO: 569 - DNA, 21 bp, Artificial sequence
  siRNAs to PCSK9
  modified_base 1, 3, 4, 6, 8, 12, 13, 14, 15, 16, 17, 18: /mod_base = "2'-O-methyl corresponding base"
  modified_base 21: /mod_base = "5'-thio thymidine"
  modified_base 2, 5, 7, 9, 10, 11, 19: /mod_base = "2'-hydroxy corresponding base"
cgcuguguggaccucuuugtt

SEQ ID NO: 570 - DNA, 21 bp, Artificial sequence
  siRNAs to PCSK9
  modified_base 1, 11, 13, 15: /mod_base = "2'-O-methyl corresponding base"
  modified_base 21: /mod_base = "5'-thio thymidine"
  modified_base 2, 3, 4, 5, 6, 7, 8, 9, 10, 12, 14, 16, 17, 18, 19: /mod_base = "2'-hydroxy corresponding base"
caaagagguccacacagcgtt

SEQ ID NO: 571 - DNA, 21 bp, Artificial sequence
  siRNAs to PCSK9
  modified_base 21: /mod_base = "5'-thio thymidine"
  modified_base 1..19: /mod_base = "2'-hydroxy corresponding base"
gacaucauuggugccuccatt

SEQ ID NO: 572 - DNA, 21 bp, Artificial sequence
  siRNAs to PCSK9
  modified_base 21: /mod_base = "5'-thio thymidine"
  modified_base 1..19: /mod_base = "2'-hydroxy corresponding base"
uggaggcaccaaugauguctt

SEQ ID NO: 573 - DNA, 21 bp, Artificial sequence
  siRNAs to PCSK9
  modified_base 3, 5, 6, 8, 9, 12, 14, 15, 16, 17, 18: /mod_base = "2'-O-methyl corresponding base"
  modified_base 21: /mod_base = "5'-thio thymidine"
  modified_base 1, 2, 4, 7, 10, 11, 13, 19: /mod_base = "2'-hydroxy corresponding base"
gacaucauuggugccuccatt

SEQ ID NO: 574 - DNA, 21 bp, Artificial sequence
  siRNAs to PCSK9
  modified_base 7, 10: /mod_base = "2'-O-methyl corresponding base"
  modified_base 21: /mod_base = "5'-thio thymidine"
  modified_base 1, 2, 3, 4, 5, 6, 8, 9, 11, 12, 13, 14, 15, 16, 17, 18, 19: /mod_base = "2'-hydroxy corresponding base"
uggaggcaccaaugauguctt

SEQ ID NO: 575 - DNA, 21 bp, Artificial sequence
  siRNAs to PCSK9
  modified_base 21: /mod_base = "5'-thio thymidine"
  modified_base 1..19: /mod_base = "2'-hydroxy corresponding base"
ucauuggugccuccagcgatt

SEQ ID NO: 576 - DNA, 21 bp, Artificial sequence
  siRNAs to PCSK9
  modified_base 21: /mod_base = "5'-thio thymidine"
  modified_base 1..19: /mod_base = "2'-hydroxy corresponding base"
ucgcuggaggcaccaaugatt

SEQ ID NO: 577 - DNA, 21 bp, Artificial sequence
  siRNAs to PCSK9
  modified_base 1, 2, 4, 5, 8, 10, 11, 12, 13, 14, 17: /mod_base = "2'-O-methyl corresponding base"
  modified_base 21: /mod_base = "5'-thio thymidine"
  modified_base 3, 6, 7, 9, 15, 16, 18, 19: /mod_base = "2'-hydroxy corresponding base"
ucauuggugccuccagcgatt

SEQ ID NO: 578 - DNA, 21 bp, Artificial sequence
  siRNAs to PCSK9
  modified_base 11, 14: /mod_base = "2'-O-methyl corresponding base"
  modified_base 21: /mod_base = "5'-thio thymidine"
  modified_base 1, 2, 3, 4, 5, 6, 7, 8, 9, 10, 12, 13, 15, 16, 17, 18, 19: /mod_base = "2'-hydroxy corresponding base"
ucgcuggaggcaccaaugatt

SEQ ID NO: 579 - DNA, 21 bp, Artificial sequence
  siRNAs to PCSK9
  modified_base 21: /mod_base = "5'-thio thymidine"
  modified_base 1..19: /mod_base = "2'-hydroxy corresponding base"
agcaccugcuuugugucactt

SEQ ID NO: 580 - DNA, 21 bp, Artificial sequence
  siRNAs to PCSK9
  modified_base 21: /mod_base = "5'-thio thymidine"
  modified_base 1..19: /mod_base = "2'-hydroxy corresponding base"
gugacacaaagcaggugcutt

SEQ ID NO: 581 - DNA, 21 bp, Artificial sequence
  siRNAs to PCSK9
  modified_base 3, 5, 6, 7, 9, 10, 11, 12, 14, 16, 17, 19: /mod_base = "2'-O-methyl corresponding base"
  modified_base 21: /mod_base = "5'-thio thymidine"
  modified_base 1, 2, 4, 8, 13, 15, 18: /mod_base = "2'-hydroxy corresponding base"
agcaccugcuuugugucactt

SEQ ID NO: 582 - DNA, 21 bp, Artificial sequence
  siRNAs to PCSK9
  modified_base 5, 7, 12: /mod_base = "2'-O-methyl corresponding base"
  modified_base 21: /mod_base = "5'-thio thymidine"
  modified_base 1, 2, 3, 4, 6, 8, 9, 10, 11, 13, 14, 15, 16, 17, 18, 19: /mod_base = "2'-hydroxy corresponding base"
gugacacaaagcaggugcutt

SEQ ID NO: 583 - DNA, 21 bp, Artificial sequence
  siRNAs to PCSK9
  modified_base 1..19: /mod_base = "2'-hydroxy corresponding base"
cacagagugggacaucacatt

SEQ ID NO: 584 - DNA, 21 bp, Artificial sequence
  siRNAs to PCSK9
  modified_base 1..19: /mod_base = "2'-hydroxy corresponding base"
ugugaugucccacucugugtt

SEQ ID NO: 585 - DNA, 21 bp, Artificial sequence
  siRNAs to PCSK9
  modified_base 21: /mod_base = "5'-thio thymidine"
  modified_base 1..19: /mod_base = "2'-hydroxy corresponding base"
augcugucugccgagccggtt

SEQ ID NO: 586 - DNA, 21 bp, Artificial sequence
  siRNAs to PCSK9
  modified_base 21: /mod_base = "5'-thio thymidine"
  modified_base 1..19: /mod_base = "2'-hydroxy corresponding base"
ccggcucggcagacagcautt

SEQ ID NO: 587 - DNA, 21 bp, Artificial sequence
  siRNAs to PCSK9
  modified_base 2, 4, 5, 7, 8, 9, 11, 12, 16, 17: /mod_base = "2'-O-methyl corresponding base"
  modified_base 21: /mod_base = "5'-thio thymidine"
  modified_base 1, 3, 6, 10, 13, 14, 15, 18, 19: /mod_base = "2'-hydroxy corresponding base"
augcugucugccgagccggtt

SEQ ID NO: 588 - DNA, 21 bp, Artificial sequence
  siRNAs to PCSK9
  modified_base 10, 14, 17: /mod_base = "2'-O-methyl corresponding base"
  modified_base 21: /mod_base = "5'-thio thymidine"
  modified_base 1, 2, 3, 4, 5, 6, 7, 8, 9, 11, 12, 13, 15, 16, 18, 19: /mod_base = "2'-hydroxy corresponding base"
ccggcucggcagacagcautt

SEQ ID NO: 589 - DNA, 21 bp, Artificial sequence
  siRNAs to PCSK9
  modified_base 21: /mod_base = "5'-thio thymidine"
  modified_base 1..19: /mod_base = "2'-hydroxy corresponding base"
gucugccgagccggagcuctt

SEQ ID NO: 590 - DNA, 21 bp, Artificial sequence
  siRNAs to PCSK9
  modified_base 21: /mod_base = "5'-thio thymidine"
  modified_base 1..19: /mod_base = "2'-hydroxy corresponding base"
gagcuccggcucggcagactt

SEQ ID NO: 591 - DNA, 21 bp, Artificial sequence
  siRNAs to PCSK9
  modified_base 2, 3, 4, 6, 7, 11, 12, 17, 18, 19: /mod_base = "2'-O-methyl corresponding base"
  modified_base 21: /mod_base = "5'-thio thymidine"
  modified_base 1, 5, 8, 9, 10, 13, 14, 15, 16: /mod_base = "2'-hydroxy corresponding base"
gucugccgagccggagcuctt

SEQ ID NO: 592 - DNA, 21 bp, Artificial sequence
  siRNAs to PCSK9
  modified_base 15: /mod_base = "2'-O-methyl corresponding base"
  modified_base 21: /mod_base = "5'-thio thymidine"
  modified_base 1, 2, 3, 4, 5, 6, 7, 8, 9, 10, 11, 12, 13, 14, 16, 17, 18, 19: /mod_base = "2'-hydroxy corresponding base"
gagcuccggcucggcagactt

SEQ ID NO: 593 - DNA, 21 bp, Artificial sequence
  siRNAs to PCSK9
  modified_base 21: /mod_base = "5'-thio thymidine"
  modified_base 1..19: /mod_base = "2'-hydroxy corresponding base"
guugaggcagagacugauctt

SEQ ID NO: 594 - DNA, 21 bp, Artificial sequence
  siRNAs to PCSK9
  modified_base 21: /mod_base = "5'-thio thymidine"
  modified_base 1..19: /mod_base = "2'-hydroxy corresponding base"
gaucagucucugccucaactt

SEQ ID NO: 595 - DNA, 21 bp, Artificial sequence
  siRNAs to PCSK9
  modified_base 2, 3, 8, 14, 15, 18, 19: /mod_base = "2'-O-methyl corresponding base"
  modified_base 21: /mod_base = "5'-thio thymidine"
  modified_base 1, 4, 5, 6, 7, 9, 10, 11, 12, 13, 16, 17: /mod_base = "2'-hydroxy corresponding base"
guugaggcagagacugauctt

SEQ ID NO: 596 - DNA, 21 bp, Artificial sequence
  siRNAs to PCSK9
  modified_base 4, 16: /mod_base = "2'-O-methyl corresponding base"
  modified_base 21: /mod_base = "5'-thio thymidine"
  modified_base 1, 2, 3, 5, 6, 7, 8, 9, 10, 11, 12, 13, 14, 15, 17, 18, 19: /mod_base = "2'-hydroxy corresponding base"
gaucagucucugccucaactt

SEQ ID NO: 597 - DNA, 21 bp, Artificial sequence
  siRNAs to PCSK9
  modified_base 21: /mod_base = "5'-thio thymidine"
  modified_base 1..19: /mod_base = "2'-hydroxy corresponding base"
gcagagacugauccacuuctt

SEQ ID NO: 598 - DNA, 21 bp, Artificial sequence
  siRNAs to PCSK9
  modified_base 21: /mod_base = "5'-thio thymidine"
  modified_base 1..19: /mod_base = "2'-hydroxy corresponding base"
gaaguggaucagucucugctt

SEQ ID NO: 599 - DNA, 21 bp, Artificial sequence
  siRNAs to PCSK9
  modified_base 2, 8, 9, 12, 13, 14, 16, 17, 18, 19: /mod_base = "2'-O-methyl corresponding base"
  modified_base 21: /mod_base = "5'-thio thymidine"
  modified_base 1, 3, 4, 5, 6, 7, 10, 11, 15: /mod_base = "2'-hydroxy corresponding base"
gcagagacugauccacuuctt

SEQ ID NO: 600 - DNA, 21 bp, Artificial sequence
  siRNAs to PCSK9
  modified_base 10: /mod_base = "2'-O-methyl corresponding base"
  modified_base 21: /mod_base = "5'-thio thymidine"
  modified_base 1, 2, 3, 4, 5, 6, 7, 8, 9, 11, 12, 13, 14, 15, 16, 17, 18, 19: /mod_base = "2'-hydroxy corresponding base"
gaaguggaucagucucugctt

SEQ ID NO: 601 - DNA, 21 bp, Artificial sequence
  siRNAs to PCSK9
  modified_base 21: /mod_base = "5'-thio thymidine"
  modified_base 1..19: /mod_base = "2'-hydroxy corresponding base"
agagacugauccacuucuctt

SEQ ID NO: 602 - DNA, 21 bp, Artificial sequence
  siRNAs to PCSK9
  modified_base 21: /mod_base = "5'-thio thymidine"
  modified_base 1..19: /mod_base = "2'-hydroxy corresponding base"
gagaaguggaucagucucutt

SEQ ID NO: 603 - DNA, 21 bp, Artificial sequence
  siRNAs to PCSK9
  modified_base 6, 7, 10, 11, 12, 14, 15, 16, 17, 18, 19: /mod_base = "2'-O-methyl corresponding base"
  modified_base 21: /mod_base = "5'-thio thymidine"
  modified_base 1, 2, 3, 4, 5, 8, 9, 13: /mod_base = "2'-hydroxy corresponding base"
agagacugauccacuucuctt

SEQ ID NO: 604 - DNA, 21 bp, Artificial sequence
  siRNAs to PCSK9
  modified_base 12: /mod_base = "2'-O-methyl corresponding base"
  modified_base 21: /mod_base = "5'-thio thymidine"
  modified_base 1, 2, 3, 4, 5, 6, 7, 8, 9, 10, 11, 13, 14, 15, 16, 17, 18, 19: /mod_base = "2'-hydroxy corresponding base"
gagaaguggaucagucucutt

SEQ ID NO: 605 - DNA, 21 bp, Artificial sequence
  siRNAs to PCSK9
  modified_base 21: /mod_base = "5'-thio thymidine"
  modified_base 1..19: /mod_base = "2'-hydroxy corresponding base"
uucucugccaaagaugucatt

SEQ ID NO: 606 - DNA, 21 bp, Artificial sequence
  siRNAs to PCSK9
  modified_base 21: /mod_base = "5'-thio thymidine"
  modified_base 1..19: /mod_base = "2'-hydroxy corresponding base"
ugacaucuuuggcagagaatt

SEQ ID NO: 607 - DNA, 21 bp, Artificial sequence
  siRNAs to PCSK9
  modified_base 1, 2, 3, 4, 5, 6, 8, 9, 15, 17, 18: /mod_base = "2'-O-methyl corresponding base"
  modified_base 21: /mod_base = "5'-thio thymidine"
  modified_base 7, 10, 11, 12, 13, 14, 16, 19: /mod_base = "2'-hydroxy corresponding base"
uucucugccaaagaugucatt

SEQ ID NO: 608 - DNA, 21 bp, Artificial sequence
  siRNAs to PCSK9
  modified_base 4, 13: /mod_base = "2'-O-methyl corresponding base"
  modified_base 21: /mod_base = "5'-thio thymidine"
  modified_base 1, 2, 3, 5, 6, 7, 8, 9, 10, 11, 12, 14, 15, 16, 17, 18, 19: /mod_base = "2'-hydroxy corresponding base"
ugacaucuuuggcagagaatt

SEQ ID NO: 609 - DNA, 21 bp, Artificial sequence
  siRNAs to PCSK9
  modified_base 21: /mod_base = "5'-thio thymidine"
  modified_base 1..19: /mod_base = "2'-hydroxy corresponding base"
cucugccaaagaugucauctt

SEQ ID NO: 610 - DNA, 21 bp, Artificial sequence
  siRNAs to PCSK9
  modified_base 21: /mod_base = "5'-thio thymidine"
  modified_base 1..19: /mod_base = "2'-hydroxy corresponding base"
gaugacaucuuuggcagagtt

SEQ ID NO: 611 - DNA, 21 bp, Artificial sequence
  siRNAs to PCSK9
  modified_base 1, 2, 3, 4, 6, 7, 13, 15, 16, 18, 19: /mod_base = "2'-O-methyl corresponding base"
  modified_base 21: /mod_base = "5'-thio thymidine"
  modified_base 5, 8, 9, 10, 11, 12, 14, 17: /mod_base = "2'-hydroxy corresponding base"
cucugccaaagaugucauctt

SEQ ID NO: 612 - DNA, 21 bp, Artificial sequence
  siRNAs to PCSK9
  modified_base 6, 15: /mod_base = "2'-O-methyl corresponding base"
  modified_base 21: /mod_base = "5'-thio thymidine"
  modified_base 1, 2, 3, 4, 5, 7, 8, 9, 10, 11, 12, 13, 14, 16, 17, 18, 19: /mod_base = "2'-hydroxy corresponding base"
gaugacaucuuuggcagagtt

SEQ ID NO: 613 - DNA, 21 bp, Artificial sequence
  siRNAs to PCSK9
  modified_base 21: /mod_base = "5'-thio thymidine"
  modified_base 1..19: /mod_base = "2'-hydroxy corresponding base"
cugaggaccagcggguacutt

SEQ ID NO: 614 - DNA, 21 bp, Artificial sequence
  siRNAs to PCSK9
  modified_base 21: /mod_base = "5'-thio thymidine"
  modified_base 1..19: /mod_base = "2'-hydroxy corresponding base"
aguacccgcugguccucagtt

SEQ ID NO: 615 - DNA, 21 bp, Artificial sequence
  siRNAs to PCSK9
  modified_base 1, 2, 8, 9, 12, 16, 18, 19: /mod_base = "2'-O-methyl corresponding base"
  modified_base 21: /mod_base = "5'-thio thymidine"
  modified_base 3, 4, 5, 6, 7, 10, 11, 13, 14, 15, 17: /mod_base = "2'-hydroxy corresponding base"
cugaggaccagcggguacutt

SEQ ID NO: 616 - DNA, 21 bp, Artificial sequence
  siRNAs to PCSK9
  modified_base 3, 17: /mod_base = "2'-O-methyl corresponding base"
  modified_base 21: /mod_base = "5'-thio thymidine"
  modified_base 1, 2, 4, 5, 6, 7, 8, 9, 10, 11, 12, 13, 14, 15, 16, 18, 19: /mod_base = "2'-hydroxy corresponding base"
aguacccgcugguccucagtt

SEQ ID NO: 617 - DNA, 21 bp, Artificial sequence
  siRNAs to PCSK9
  modified_base 21: /mod_base = "5'-thio thymidine"
  modified_base 1..19: /mod_base = "2'-hydroxy corresponding base"
ugaggaccagcggguacugtt

SEQ ID NO: 618 - DNA, 21 bp, Artificial sequence
  siRNAs to PCSK9
  modified_base 21: /mod_base = "5'-thio thymidine"
  modified_base 1..19: /mod_base = "2'-hydroxy corresponding base"
caguacccgcugguccucatt

SEQ ID NO: 619 - DNA, 21 bp, Artificial sequence
  siRNAs to PCSK9
  modified_base 1, 7, 8, 11, 15, 17, 18: /mod_base = "2'-O-methyl corresponding base"
  modified_base 21: /mod_base = "5'-thio thymidine"
  modified_base 2, 3, 4, 5, 6, 9, 10, 12, 13, 14, 16, 19: /mod_base = "2'-hydroxy corresponding base"
ugaggaccagcggguacugtt

SEQ ID NO: 620 - DNA, 21 bp, Artificial sequence
  siRNAs to PCSK9
  modified_base 1, 4, 18: /mod_base = "2'-O-methyl corresponding base"
  modified_base 21: /mod_base = "5'-thio thymidine"
  modified_base 2, 3, 5, 6, 7, 8, 9, 10, 11, 12, 13, 14, 15, 16, 17, 19: /mod_base = "2'-hydroxy corresponding base"
caguacccgcugguccucatt

SEQ ID NO: 621 - DNA, 21 bp, Artificial sequence
  siRNAs to PCSK9
  modified_base 1..19: /mod_base = "2'-hydroxy corresponding base"
acuguauggucagcacacutt

SEQ ID NO: 622 - DNA, 21 bp, Artificial sequence
  siRNAs to PCSK9
  modified_base 1..19: /mod_base = "2'-hydroxy corresponding base"
agugugcugaccauacagutt

SEQ ID NO: 623 - DNA, 21 bp, Artificial sequence
  siRNAs to PCSK9
  modified_base 1..19: /mod_base = "2'-hydroxy corresponding base"
uguauggucagcacacucgtt

SEQ ID NO: 624 - DNA, 21 bp, Artificial sequence
  siRNAs to PCSK9
  modified_base 1..19: /mod_base = "2'-hydroxy corresponding base"
cgagugugcugaccauacatt

SEQ ID NO: 625 - DNA, 21 bp, Artificial sequence
  siRNAs to PCSK9
  modified_base 1..19: /mod_base = "2'-hydroxy corresponding base"
guauggucagcacacucggtt

SEQ ID NO: 626 - DNA, 21 bp, Artificial sequence
  siRNAs to PCSK9
  modified_base 1..19: /mod_base = "2'-hydroxy corresponding base"
ccgagugugcugaccauactt

SEQ ID NO: 627 - DNA, 21 bp, Artificial sequence
  siRNAs to PCSK9
  modified_base 1..19: /mod_base = "2'-hydroxy corresponding base"
ggauggccacagccgucgctt

SEQ ID NO: 628 - DNA, 21 bp, Artificial sequence
  siRNAs to PCSK9
  modified_base 1..19: /mod_base = "2'-hydroxy corresponding base"
gcgacggcuguggccaucctt

SEQ ID NO: 629 - DNA, 21 bp, Artificial sequence
  siRNAs to PCSK9
  modified_base 1..19: /mod_base = "2'-hydroxy corresponding base"
gauggccacagccgucgcctt

SEQ ID NO: 630 - DNA, 21 bp, Artificial sequence
  siRNAs to PCSK9
  modified_base 1..19: /mod_base = "2'-hydroxy corresponding base"
ggcgacggcuguggccauctt

SEQ ID NO: 631 - DNA, 21 bp, Artificial sequence
  siRNAs to PCSK9
  modified_base 1..19: /mod_base = "2'-hydroxy corresponding base"
caagcuggucugccgggcctt

SEQ ID NO: 632 - DNA, 21 bp, Artificial sequence
  siRNAs to PCSK9
  modified_base 1..19: /mod_base = "2'-hydroxy corresponding base"
ggcccggcagaccagcuugtt

SEQ ID NO: 633 - DNA, 21 bp, Artificial sequence
  siRNAs to PCSK9
  modified_base 21: /mod_base = "5'-thio thymidine"
  modified_base 1..19: /mod_base = "2'-hydroxy corresponding base"
cugccgggcccacaacgcutt

SEQ ID NO: 634 - DNA, 21 bp, Artificial sequence
  siRNAs to PCSK9
  modified_base 21: /mod_base = "5'-thio thymidine"
  modified_base 1..19: /mod_base = "2'-hydroxy corresponding base"
agcguugugggcccggcagtt

SEQ ID NO: 635 - DNA, 21 bp, Artificial sequence
  siRNAs to PCSK9
  modified_base 1, 2, 4, 5, 9, 10, 11, 13, 16, 18, 19: /mod_base = "2'-O-methyl corresponding base"
  modified_base 21: /mod_base = "5'-thio thymidine"
  modified_base 3, 6, 7, 8, 12, 14, 15, 17: /mod_base = "2'-hydroxy corresponding base"
cugccgggcccacaacgcutt

SEQ ID NO: 636 - DNA, 21 bp, Artificial sequence
  siRNAs to PCSK9
  modified_base 17: /mod_base = "2'-O-methyl corresponding base"
  modified_base 21: /mod_base = "5'-thio thymidine"
  modified_base 1, 2, 3, 4, 5, 6, 7, 8, 9, 10, 11, 12, 13, 14, 15, 16, 18, 19: /mod_base = "2'-hydroxy corresponding base"
agcguugugggcccggcagtt

SEQ ID NO: 637 - DNA, 21 bp, Artificial sequence
  siRNAs to PCSK9
  modified_base 21: /mod_base = "5'-thio thymidine"
  modified_base 1..19: /mod_base = "2'-hydroxy corresponding base"
ugccgggcccacaacgcuutt

SEQ ID NO: 638 - DNA, 21 bp, Artificial sequence
  siRNAs to PCSK9
  modified_base 21: /mod_base = "5'-thio thymidine"
  modified_base 1..19: /mod_base = "2'-hydroxy corresponding base"
aagcguugugggcccggcatt

SEQ ID NO: 639 - DNA, 21 bp, Artificial sequence
  siRNAs to PCSK9
  modified_base 1, 3, 4, 8, 9, 10, 12, 15, 17, 18, 19: /mod_base = "2'-O-methyl corresponding base"
  modified_base 21: /mod_base = "5'-thio thymidine"
  modified_base 2, 5, 6, 7, 11, 13, 14, 16: /mod_base = "2'-hydroxy corresponding base"
ugccgggcccacaacgcuutt

SEQ ID NO: 640 - DNA, 21 bp, Artificial sequence
  siRNAs to PCSK9
  modified_base 18: /mod_base = "2'-O-methyl corresponding base"
  modified_base 21: /mod_base = "5'-thio thymidine"
  modified_base 1, 2, 3, 4, 5, 6, 7, 8, 9, 10, 11, 12, 13, 14, 15, 16, 17, 19: /mod_base = "2'-hydroxy corresponding base"
aagcguugugggcccggcatt

SEQ ID NO: 641 - DNA, 21 bp, Artificial sequence
  siRNAs to PCSK9
  modified_base 21: /mod_base = "5'-thio thymidine"
  modified_base 1..19: /mod_base = "2'-hydroxy corresponding base"
ccgggcccacaacgcuuuutt

SEQ ID NO: 642 - DNA, 21 bp, Artificial sequence
  siRNAs to PCSK9
  modified_base 21: /mod_base = "5'-thio thymidine"
  modified_base 1..19: /mod_base = "2'-hydroxy corresponding base"
aaaagcguugugggcccggtt

SEQ ID NO: 643 - DNA, 21 bp, Artificial sequence
  siRNAs to PCSK9
  modified_base 1, 2, 6, 7, 8, 10, 13, 15, 16, 17, 18, 19: /mod_base = "2'-O-methyl corresponding base"
  modified_base 21: /mod_base = "5'-thio thymidine"
  modified_base 3, 4, 5, 9, 11, 12, 14: /mod_base = "2'-hydroxy corresponding base"
ccgggcccacaacgcuuuutt

SEQ ID NO: 644 - DNA, 21 bp, Artificial sequence
  siRNAs to PCSK9
  modified_base 21: /mod_base = "5'-thio thymidine"
  modified_base 1..19: /mod_base = "2'-hydroxy corresponding base"
aaaagcguugugggcccggtt

SEQ ID NO: 645 - DNA, 21 bp, Artificial sequence
  siRNAs to PCSK9
  modified_base 21: /mod_base = "5'-thio thymidine"
  modified_base 1..19: /mod_base = "2'-hydroxy corresponding base"
gggcccacaacgcuuuuggtt

SEQ ID NO: 646 - DNA, 21 bp, Artificial sequence
  siRNAs to PCSK9
  modified_base 21: /mod_base = "5'-thio thymidine"
  modified_base 1..19: /mod_base = "2'-hydroxy corresponding base"
ccaaaagcguugugggccctt

SEQ ID NO: 647 - DNA, 21 bp, Artificial sequence
  siRNAs to PCSK9
  modified_base 4, 5, 6, 8, 11, 13, 14, 15, 16, 17: /mod_base = "2'-O-methyl corresponding base"
  modified_base 21: /mod_base = "5'-thio thymidine"
  modified_base 1, 2, 3, 7, 9, 10, 12, 18, 19: /mod_base = "2'-hydroxy corresponding base"
gggcccacaacgcuuuuggtt

SEQ ID NO: 648 - DNA, 21 bp, Artificial sequence
  siRNAs to PCSK9
  modified_base 2: /mod_base = "2'-O-methyl corresponding base"
  modified_base 21: /mod_base = "5'-thio thymidine"
  modified_base 1, 3, 4, 5, 6, 7, 8, 9, 10, 11, 12, 13, 14, 15, 16, 17, 18, 19: /mod_base = "2'-hydroxy corresponding base"
ccaaaagcguugugggccctt

SEQ ID NO: 649 - DNA, 21 bp, Artificial sequence
  siRNAs to PCSK9
  modified_base 21: /mod_base = "5'-thio thymidine"
  modified_base 1..19: /mod_base = "2'-hydroxy corresponding base"
ggugagggugucuacgccatt

SEQ ID NO: 650 - DNA, 21 bp, Artificial sequence
  siRNAs to PCSK9
  modified_base 21: /mod_base = "5'-thio thymidine"
  modified_base 1..19: /mod_base = "2'-hydroxy corresponding base"
uggcguagacacccucacctt

SEQ ID NO: 651 - DNA, 21 bp, Artificial sequence
  siRNAs to PCSK9
  modified_base 3, 9, 11, 12, 13, 15, 17, 18: /mod_base = "2'-O-methyl corresponding base"
  modified_base 21: /mod_base = "5'-thio thymidine"
  modified_base 1, 2, 4, 5, 6, 7, 8, 10, 14, 16, 19: /mod_base = "2'-hydroxy corresponding base"
ggugagggugucuacgccatt

SEQ ID NO: 652 - DNA, 21 bp, Artificial sequence
  siRNAs to PCSK9
  modified_base 6, 10, 16: /mod_base = "2'-O-methyl corresponding base"
  modified_base 21: /mod_base = "5'-thio thymidine"
  modified_base 1, 2, 3, 4, 5, 7, 8, 9, 11, 12, 13, 14, 15, 17, 18, 19: /mod_base = "2'-hydroxy corresponding base"
uggcguagacacccucacctt

SEQ ID NO: 653 - DNA, 21 bp, Artificial sequence
  siRNAs to PCSK9
  modified_base 21: /mod_base = "5'-thio thymidine"
  modified_base 1..19: /mod_base = "2'-hydroxy corresponding base"
gagggugucuacgccauugtt

SEQ ID NO: 654 - DNA, 21 bp, Artificial sequence
  siRNAs to PCSK9
  modified_base 21: /mod_base = "5'-thio thymidine"
  modified_base 1..19: /mod_base = "2'-hydroxy corresponding base"
caauggcguagacacccuctt

SEQ ID NO: 655 - DNA, 21 bp, Artificial sequence
  siRNAs to PCSK9
  modified_base 6, 8, 9, 10, 12, 14, 15, 17, 18: /mod_base = "2'-O-methyl corresponding base"
  modified_base 21: /mod_base = "5'-thio thymidine"
  modified_base 1, 2, 3, 4, 5, 7, 11, 13, 16, 19: /mod_base = "2'-hydroxy corresponding base"
gagggugucuacgccauugtt

SEQ ID NO: 656 - DNA, 21 bp, Artificial sequence
  siRNAs to PCSK9
  modified_base 1, 9, 13: /mod_base = "2'-O-methyl corresponding base"
  modified_base 21: /mod_base = "5'-thio thymidine"
  modified_base 2, 3, 4, 5, 6, 7, 8, 10, 11, 12, 14, 15, 16, 17, 18, 19: /mod_base = "2'-hydroxy corresponding base"
caauggcguagacacccuctt

SEQ ID NO: 657 - DNA, 21 bp, Artificial sequence
  siRNAs to PCSK9
  modified_base 21: /mod_base = "5'-thio thymidine"
  modified_base 1..19: /mod_base = "2'-hydroxy corresponding base"
gccaggugcugccugcuactt

SEQ ID NO: 658 - DNA, 21 bp, Artificial sequence
  siRNAs to PCSK9
  modified_base 21: /mod_base = "5'-thio thymidine"
  modified_base 1..19: /mod_base = "2'-hydroxy corresponding base"
guagcaggcagcaccuggctt

SEQ ID NO: 659 - DNA, 21 bp, Artificial sequence
  siRNAs to PCSK9
  modified_base 2, 3, 7, 9, 10, 12, 13, 14, 16, 17, 19: /mod_base = "2'-O-methyl corresponding base"
  modified_base 21: /mod_base = "5'-thio thymidine"
  modified_base 1, 4, 5, 6, 8, 11, 15, 18: /mod_base = "2'-hydroxy corresponding base"
gccaggugcugccugcuactt

SEQ ID NO: 660 - DNA, 21 bp, Artificial sequence
  siRNAs to PCSK9
  modified_base 2, 5, 9, 12: /mod_base = "2'-O-methyl corresponding base"
  modified_base 21: /mod_base = "5'-thio thymidine"
  modified_base 1, 3, 4, 6, 7, 8, 10, 11, 13, 14, 15, 16, 17, 18, 19: /mod_base = "2'-hydroxy corresponding base"
guagcaggcagcaccuggctt

SEQ ID NO: 661 - DNA, 21 bp, Artificial sequence
  siRNAs to PCSK9
  modified_base 21: /mod_base = "5'-thio thymidine"
  modified_base 1..19: /mod_base = "2'-hydroxy corresponding base"
ccaggugcugccugcuacctt

SEQ ID NO: 662 - DNA, 21 bp, Artificial sequence
  siRNAs to PCSK9
  modified_base 21: /mod_base = "5'-thio thymidine"
  modified_base 1..19: /mod_base = "2'-hydroxy corresponding base"
gguagcaggcagcaccuggtt

SEQ ID NO: 663 - DNA, 21 bp, Artificial sequence
  siRNAs to PCSK9
  modified_base 1, 2, 6, 8, 9, 11, 12, 13, 15, 16, 18, 19: /mod_base = "2'-O-methyl corresponding base"
  modified_base 21: /mod_base = "5'-thio thymidine"
  modified_base 3, 4, 5, 7, 10, 14, 17: /mod_base = "2'-hydroxy corresponding base"
ccaggugcugccugcuacctt

SEQ ID NO: 664 - DNA, 21 bp, Artificial sequence
  siRNAs to PCSK9
  modified_base 3, 6, 10, 13: /mod_base = "2'-O-methyl corresponding base"
  modified_base 21: /mod_base = "5'-thio thymidine"
  modified_base 1, 2, 4, 5, 7, 8, 9, 11, 12, 14, 15, 16, 17, 18, 19: /mod_base = "2'-hydroxy corresponding base"
gguagcaggcagcaccuggtt

SEQ ID NO: 665 - DNA, 21 bp, Artificial sequence
  siRNAs to PCSK9
  modified_base 1..19: /mod_base = "2'-hydroxy corresponding base"
acccacaagccgccugugctt

SEQ ID NO: 666 - DNA, 21 bp, Artificial sequence
  siRNAs to PCSK9
  modified_base 1..19: /mod_base = "2'-hydroxy corresponding base"
gcacaggcggcuugugggutt

SEQ ID NO: 667 - DNA, 21 bp, Artificial sequence
  siRNAs to PCSK9
  modified_base 21: /mod_base = "5'-thio thymidine"
  modified_base 1..19: /mod_base = "2'-hydroxy corresponding base"
gugcugaggccacgagguctt

SEQ ID NO: 668 - DNA, 21 bp, Artificial sequence
  siRNAs to PCSK9
  modified_base 21: /mod_base = "5'-thio thymidine"
  modified_base 1..19: /mod_base = "2'-hydroxy corresponding base"
gaccucguggccucagcactt

SEQ ID NO: 669 - DNA, 21 bp, Artificial sequence
  siRNAs to PCSK9
  modified_base 2, 4, 5, 10, 11, 13, 18, 19: /mod_base = "2'-O-methyl corresponding base"
  modified_base 21: /mod_base = "5'-thio thymidine"
  modified_base 1, 3, 6, 7, 8, 9, 12, 14, 15, 16, 17: /mod_base = "2'-hydroxy corresponding base"
gugcugaggccacgagguctt

SEQ ID NO: 670 - DNA, 21 bp, Artificial sequence
  siRNAs to PCSK9
  modified_base 14, 17: /mod_base = "2'-O-methyl corresponding base"
  modified_base 21: /mod_base = "5'-thio thymidine"
  modified_base 1, 2, 3, 4, 5, 6, 7, 8, 9, 10, 11, 12, 13, 15, 16, 18, 19: /mod_base = "2'-hydroxy corresponding base"
gaccucguggccucagcactt

SEQ ID NO: 671 - DNA, 21 bp, Artificial sequence
  siRNAs to PCSK9
  modified_base 21: /mod_base = "5'-thio thymidine"
  modified_base 1..19: /mod_base = "2'-hydroxy corresponding base"
ugcugaggccacgaggucatt

SEQ ID NO: 672 - DNA, 21 bp, Artificial sequence
  siRNAs to PCSK9
  modified_base 21: /mod_base = "5'-thio thymidine"
  modified_base 1..19: /mod_base = "2'-hydroxy corresponding base"
ugaccucguggccucagcatt

SEQ ID NO: 673 - DNA, 21 bp, Artificial sequence
  siRNAs to PCSK9
  modified_base 21: /mod_base = "5'-thio thymidine"
  modified_base 1..19: /mod_base = "2'-hydroxy corresponding base"
ugcugaggccacgaggucatt

SEQ ID NO: 674 - DNA, 21 bp, Artificial sequence
  siRNAs to PCSK9
  modified_base 21: /mod_base = "5'-thio thymidine"
  modified_base 1..19: /mod_base = "2'-hydroxy corresponding base"
ugaccucguggccucagcatt

SEQ ID NO: 675 - DNA, 21 bp, Artificial sequence
  siRNAs to PCSK9
  modified_base 1, 3, 4, 9, 10, 12, 17, 18: /mod_base = "2'-O-methyl corresponding base"
  modified_base 21: /mod_base = "5'-thio thymidine"
  modified_base 2, 5, 6, 7, 8, 11, 13, 14, 15, 16, 19: /mod_base = "2'-hydroxy corresponding base"
ugcugaggccacgaggucatt

SEQ ID NO: 676 - DNA, 21 bp, Artificial sequence
  siRNAs to PCSK9
  modified_base 15, 18: /mod_base = "2'-O-methyl corresponding base"
  modified_base 21: /mod_base = "5'-thio thymidine"
  modified_base 1, 2, 3, 4, 5, 6, 7, 8, 9, 10, 11, 12, 13, 14, 16, 17, 19: /mod_base = "2'-hydroxy corresponding base"
ugaccucguggccucagcatt

SEQ ID NO: 677 - DNA, 21 bp, Artificial sequence
  siRNAs to PCSK9
  modified_base 2, 4, 6, 8, 10, 12, 14, 16, 18: /mod_base = "2'-O-methyl corresponding base"
  modified_base 1, 3, 5, 7, 9, 11, 13, 15, 17, 19: /mod_base = "2'-deoxy-2'-fluoro corresponding base"
  modified_base 21: /mod_base = "5'-thio thymidine"
ugcugaggccacgaggucatt

SEQ ID NO: 678 - DNA, 21 bp, Artificial sequence
  siRNAs to PCSK9
  modified_base 1, 3, 5, 7, 9, 11, 13, 15, 17, 19: /mod_base = "2'-O-methyl corresponding base"
  modified_base 2, 4, 6, 8, 10, 12, 14, 16, 18: /mod_base = "2'-deoxy-2'-fluoro corresponding base"
  modified_base 21: /mod_base = "5'-thio thymidine"
ugaccucguggccucagcatt

SEQ ID NO: 679 - DNA, 21 bp, Artificial sequence
  siRNAs to PCSK9
  modified_base 1, 3, 4, 9, 10, 12, 17, 18: /mod_base = "2'-deoxy-2'-fluoro corresponding base"
  modified_base 21: /mod_base = "5'-thio thymidine"
  modified_base 2, 5, 6, 7, 8, 11, 13, 14, 15, 16, 19: /mod_base = "2'-hydroxy corresponding base"
ugcugaggccacgaggucatt

SEQ ID NO: 680 - DNA, 21 bp, Artificial sequence
  siRNAs to PCSK9
  modified_base 1, 4, 5, 6, 7, 9, 12, 13, 14, 15, 18: /mod_base = "2'-deoxy-2'-fluoro corresponding base"
  modified_base 21: /mod_base = "5'-thio thymidine"
  modified_base 2, 3, 8, 10, 11, 16, 17, 19: /mod_base = "2'-hydroxy corresponding base"
ugaccucguggccucagcatt

SEQ ID NO: 681 - DNA, 21 bp, Artificial sequence
  siRNAs to PCSK9
  modified_base 2, 4, 6, 8, 10, 12, 14, 16, 18: /mod_base = "2'-O-methyl corresponding base"
  modified_base 21: /mod_base = "5'-thio thymidine"
  modified_base 1, 3, 5, 7, 9, 11, 13, 15, 17, 19: /mod_base = "2'-hydroxy corresponding base"
ugcugaggccacgaggucatt

SEQ ID NO: 682 - DNA, 21 bp, Artificial sequence
  siRNAs to PCSK9
  modified_base 1, 3, 5, 7, 9, 11, 13, 15, 17, 19: /mod_base = "2'-O-methyl corresponding base"
  modified_base 2, 4, 6, 8, 10, 12, 14, 16, 18: /mod_base = "2'-deoxy-2'-fluoro corresponding base"
  modified_base 21: /mod_base = "5'-thio thymidine"
ugaccucguggccucagcatt

SEQ ID NO: 683 - DNA, 21 bp, Artificial sequence
  siRNAs to PCSK9
  modified_base 2, 4, 6, 8, 10, 12, 14, 16, 18: /mod_base = "2'-O-methyl corresponding base"
  modified_base 21: /mod_base = "5'-thio thymidine"
  modified_base 1, 3, 5, 7, 9, 11, 13, 15, 17, 19: /mod_base = "2'-hydroxy corresponding base"
ugcugaggccacgaggucatt

SEQ ID NO: 684 - DNA, 21 bp, Artificial sequence
  siRNAs to PCSK9
  modified_base 1, 4, 5, 6, 7, 9, 12, 13, 14, 15, 18: /mod_base = "2'-deoxy-2'-fluoro corresponding base"
  modified_base 21: /mod_base = "5'-thio thymidine"
  modified_base 2, 3, 8, 10, 11, 16, 17, 19: /mod_base = "2'-hydroxy corresponding base"
ugaccucguggccucagcatt

SEQ ID NO: 685 - DNA, 21 bp, Artificial sequence
  siRNAs to PCSK9
  modified_base 2, 4, 6, 8, 10, 12, 14, 16, 18: /mod_base = "2'-O-methyl corresponding base"
  modified_base 1, 3, 5, 7, 9, 11, 13, 15, 17, 19: /mod_base = "2'-deoxy-2'-fluoro corresponding base"
  modified_base 21: /mod_base = "5'-thio thymidine"
ugcugaggccacgaggucatt

SEQ ID NO: 686 - DNA, 21 bp, Artificial sequence
  siRNAs to PCSK9
  modified_base 6, 7, 10, 11, 17, 18, 19: /mod_base = "2'-O-methyl corresponding base"
  modified_base 21: /mod_base = "5'-thio thymidine"
  modified_base 1, 2, 3, 4, 5, 8, 9, 12, 13, 14, 15, 16: /mod_base = "2'-hydroxy corresponding base"
ugaccucguggccucagcatt

SEQ ID NO: 687 - DNA, 21 bp, Artificial sequence
  siRNAs to PCSK9
  modified_base 1, 3, 4, 9, 10, 12, 17, 18: /mod_base = "2'-deoxy-2'-fluoro corresponding base"
  modified_base 21: /mod_base = "5'-thio thymidine"
  modified_base 2, 5, 6, 7, 8, 11, 13, 14, 15, 16, 19: /mod_base = "2'-hydroxy corresponding base"
ugcugaggccacgaggucatt

SEQ ID NO: 688 - DNA, 21 bp, Artificial sequence
  siRNAs to PCSK9
  modified_base 6, 7, 10, 11, 17, 18, 19: /mod_base = "2'-O-methyl corresponding base"
  modified_base 21: /mod_base = "5'-thio thymidine"
  modified_base 1, 2, 3, 4, 5, 8, 9, 12, 13, 14, 15, 16: /mod_base = "2'-hydroxy corresponding base"
ugaccucguggccucagcatt

SEQ ID NO: 689 - DNA, 21 bp, Artificial sequence
  siRNAs to PCSK9
  modified_base 2, 4, 6, 8, 10, 12, 14, 16, 18: /mod_base = "2'-O-methyl corresponding base"
  modified_base 21: /mod_base = "5'-thio thymidine"
  modified_base 1, 3, 5, 7, 9, 11, 13, 15, 17, 19: /mod_base = "2'-hydroxy corresponding base"
ugcugaggccacgaggucatt

SEQ ID NO: 690 - DNA, 21 bp, Artificial sequence
  siRNAs to PCSK9
  modified_base 6, 7, 10, 11, 17, 18, 19: /mod_base = "2'-O-methyl corresponding base"
  modified_base 21: /mod_base = "5'-thio thymidine"
  modified_base 1, 2, 3, 4, 5, 8, 9, 12, 13, 14, 15, 16: /mod_base = "2'-hydroxy corresponding base"
ugaccucguggccucagcatt

SEQ ID NO: 691 - DNA, 21 bp, Artificial sequence
  siRNAs to PCSK9
  modified_base 2, 4, 6, 8, 10, 12, 14, 16, 18: /mod_base = "2'-O-methyl corresponding base"
  modified_base 1, 3, 5, 7, 9, 11, 13, 15, 17, 19: /mod_base = "2'-deoxy-2'-fluoro corresponding base"
  modified_base 21: /mod_base = "5'-thio thymidine"
guggucagcggccgggaugtt

SEQ ID NO: 692 - DNA, 21 bp, Artificial sequence
  siRNAs to PCSK9
  modified_base 1, 3, 5, 7, 9, 11, 13, 15, 17, 19: /mod_base = "2'-O-methyl corresponding base"
  modified_base 2, 4, 6, 8, 10, 12, 14, 16, 18: /mod_base = "2'-deoxy-2'-fluoro corresponding base"
  modified_base 21: /mod_base = "5'-thio thymidine"
caucccggccgcugaccactt

SEQ ID NO: 693 - DNA, 21 bp, Artificial sequence
  siRNAs to PCSK9
  modified_base 2, 5, 6, 9, 12, 13, 18: /mod_base = "2'-deoxy-2'-fluoro corresponding base"
  modified_base 21: /mod_base = "5'-thio thymidine"
  modified_base 1, 3, 4, 7, 8, 10, 11, 14, 15, 16, 17, 19: /mod_base = "2'-hydroxy corresponding base"
guggucagcggccgggaugtt

SEQ ID NO: 694 - DNA, 21 bp, Artificial sequence
  siRNAs to PCSK9
  modified_base 1, 3, 4, 5, 6, 9, 10, 12, 13, 16, 17, 19: /mod_base = "2'-deoxy-2'-fluoro corresponding base"
  modified_base 21: /mod_base = "5'-thio thymidine"
  modified_base 2, 7, 8, 11, 14, 15, 18: /mod_base = "2'-hydroxy corresponding base"
caucccggccgcugaccactt

SEQ ID NO: 695 - DNA, 21 bp, Artificial sequence
  siRNAs to PCSK9
  modified_base 2, 4, 6, 8, 10, 12, 14, 16, 18: /mod_base = "2'-O-methyl corresponding base"
  modified_base 21: /mod_base = "5'-thio thymidine"
  modified_base 1, 3, 5, 7, 9, 11, 13, 15, 17, 19: /mod_base = "2'-hydroxy corresponding base"
guggucagcggccgggaugtt

SEQ ID NO: 696 - DNA, 21 bp, Artificial sequence
  siRNAs to PCSK9
  modified_base 1, 3, 5, 7, 9, 11, 13, 15, 17, 19: /mod_base = "2'-O-methyl corresponding base"
  modified_base 2, 4, 6, 8, 10, 12, 14, 16, 18: /mod_base = "2'-deoxy-2'-fluoro corresponding base"
  modified_base 21: /mod_base = "5'-thio thymidine"
caucccggccgcugaccactt

SEQ ID NO: 697 - DNA, 21 bp, Artificial sequence
  siRNAs to PCSK9
  modified_base 2, 4, 6, 8, 10, 12, 14, 16, 18: /mod_base = "2'-O-methyl corresponding base"
  modified_base 21: /mod_base = "5'-thio thymidine"
  modified_base 1, 3, 5, 7, 9, 11, 13, 15, 17, 19: /mod_base = "2'-hydroxy corresponding base"
guggucagcggccgggaugtt

SEQ ID NO: 698 - DNA, 21 bp, Artificial sequence
  siRNAs to PCSK9
  modified_base 1, 3, 4, 5, 6, 9, 10, 12, 13, 16, 17, 19: /mod_base = "2'-deoxy-2'-fluoro corresponding base"
  modified_base 21: /mod_base = "5'-thio thymidine"
  modified_base 2, 7, 8, 11, 14, 15, 18: /mod_base = "2'-hydroxy corresponding base"
caucccggccgcugaccactt

SEQ ID NO: 699 - DNA, 21 bp, Artificial sequence
  siRNAs to PCSK9
  modified_base 2, 4, 6, 8, 10, 12, 14, 16, 18: /mod_base = "2'-O-methyl corresponding base"
  modified_base 1, 3, 5, 7, 9, 11, 13, 15, 17, 19: /mod_base = "2'-deoxy-2'-fluoro corresponding base"
  modified_base 21: /mod_base = "5'-thio thymidine"
guggucagcggccgggaugtt

SEQ ID NO: 700 - DNA, 21 bp, Artificial sequence
  siRNAs to PCSK9
  modified_base 6, 7, 10, 11, 17, 18, 19: /mod_base = "2'-O-methyl corresponding base"
  modified_base 21: /mod_base = "5'-thio thymidine"
  modified_base 1, 2, 3, 4, 5, 8, 9, 12, 13, 14, 15, 16: /mod_base = "2'-hydroxy corresponding base"
caucccggccgcugaccactt

SEQ ID NO: 701 - DNA, 21 bp, Artificial sequence
  siRNAs to PCSK9
  modified_base 2, 5, 6, 9, 12, 13, 18: /mod_base = "2'-deoxy-2'-fluoro corresponding base"
  modified_base 21: /mod_base = "5'-thio thymidine"
  modified_base 1, 3, 4, 7, 8, 10, 11, 14, 15, 16, 17, 19: /mod_base = "2'-hydroxy corresponding base"
guggucagcggccgggaugtt

SEQ ID NO: 702 - DNA, 21 bp, Artificial sequence
  siRNAs to PCSK9
  modified_base 6, 7, 10, 11, 17, 18, 19: /mod_base = "2'-O-methyl corresponding base"
  modified_base 21: /mod_base = "5'-thio thymidine"
  modified_base 1, 2, 3, 4, 5, 8, 9, 12, 13, 14, 15, 16: /mod_base = "2'-hydroxy corresponding base"
caucccggccgcugaccactt

SEQ ID NO: 703 - DNA, 21 bp, Artificial sequence
  siRNAs to PCSK9
  modified_base 2, 4, 6, 8, 10, 12, 14, 16, 18: /mod_base = "2'-O-methyl corresponding base"
  modified_base 21: /mod_base = "5'-thio thymidine"
  modified_base 1, 3, 5, 7, 9, 11, 13, 15, 17, 19: /mod_base = "2'-hydroxy corresponding base"
guggucagcggccgggaugtt

SEQ ID NO: 704 - DNA, 21 bp, Artificial sequence
  siRNAs to PCSK9
  modified_base 6, 7, 10, 11, 17, 18, 19: /mod_base = "2'-O-methyl corresponding base"
  modified_base 21: /mod_base = "5'-thio thymidine"
  modified_base 1, 2, 3, 4, 5, 8, 9, 12, 13, 14, 15, 16: /mod_base = "2'-hydroxy corresponding base"
caucccggccgcugaccactt

SEQ ID NO: 705 - DNA, 21 bp, Artificial sequence
  siRNAs to PCSK9
  modified_base 1..19: /mod_base = "2'-hydroxy corresponding base"
ggccacgaggucagcccaatt

SEQ ID NO: 706 - DNA, 21 bp, Artificial sequence
  siRNAs to PCSK9
  modified_base 1..19: /mod_base = "2'-hydroxy corresponding base"
uugggcugaccucguggcctt

SEQ ID NO: 707 - DNA, 21 bp, Artificial sequence
  siRNAs to PCSK9
  modified_base 1..19: /mod_base = "2'-hydroxy corresponding base"
cgaggucagcccaaccagutt

SEQ ID NO: 708 - DNA, 21 bp, Artificial sequence
  siRNAs to PCSK9
  modified_base 1..19: /mod_base = "2'-hydroxy corresponding base"
acugguugggcugaccucgtt

SEQ ID NO: 709 - DNA, 21 bp, Artificial sequence
  siRNAs to PCSK9
  modified_base 1..19: /mod_base = "2'-hydroxy corresponding base"
gucagcccaaccagugcgutt

SEQ ID NO: 710 - DNA, 21 bp, Artificial sequence
  siRNAs to PCSK9
  modified_base 1..19: /mod_base = "2'-hydroxy corresponding base"
acgcacugguugggcugactt

SEQ ID NO: 711 - DNA, 21 bp, Artificial sequence
  siRNAs to PCSK9
  modified_base 1..19: /mod_base = "2'-hydroxy corresponding base"
cagcccaaccagugcguggtt

SEQ ID NO: 712 - DNA, 21 bp, Artificial sequence
  siRNAs to PCSK9
  modified_base 1..19: /mod_base = "2'-hydroxy corresponding base"
ccacgcacugguugggcugtt

SEQ ID NO: 713 - DNA, 21 bp, Artificial sequence
  siRNAs to PCSK9
  modified_base 1..19: /mod_base = "2'-hydroxy corresponding base"
cacagggaggccagcaucctt

SEQ ID NO: 714 - DNA, 21 bp, Artificial sequence
  siRNAs to PCSK9
  modified_base 1..19: /mod_base = "2'-hydroxy corresponding base"
ggaugcuggccucccugugtt

SEQ ID NO: 715 - DNA, 21 bp, Artificial sequence
  siRNAs to PCSK9
  modified_base 21: /mod_base = "5'-thio thymidine"
  modified_base 1..19: /mod_base = "2'-hydroxy corresponding base"
ccagcauccacgcuuccugtt

SEQ ID NO: 716 - DNA, 21 bp, Artificial sequence
  siRNAs to PCSK9
  modified_base 21: /mod_base = "5'-thio thymidine"
  modified_base 1..19: /mod_base = "2'-hydroxy corresponding base"
caggaagcguggaugcuggtt

SEQ ID NO: 717 - DNA, 21 bp, Artificial sequence
  siRNAs to PCSK9
  modified_base 1, 2, 5, 7, 8, 9, 11, 13, 14, 15, 16, 17, 18: /mod_base = "2'-O-methyl corresponding base"
  modified_base 21: /mod_base = "5'-thio thymidine"
  modified_base 3, 4, 6, 10, 12, 19: /mod_base = "2'-hydroxy corresponding base"
ccagcauccacgcuuccugtt

SEQ ID NO: 718 - DNA, 21 bp, Artificial sequence
  siRNAs to PCSK9
  modified_base 1: /mod_base = "2'-O-methyl corresponding base"
  modified_base 21: /mod_base = "5'-thio thymidine"
  modified_base 2..19: /mod_base = "2'-hydroxy corresponding base"
caggaagcguggaugcuggtt

SEQ ID NO: 719 - DNA, 21 bp, Artificial sequence
  siRNAs to PCSK9
  modified_base 21: /mod_base = "5'-thio thymidine"
  modified_base 1..19: /mod_base = "2'-hydroxy corresponding base"
agucaaggagcauggaauctt

SEQ ID NO: 720 - DNA, 21 bp, Artificial sequence
  siRNAs to PCSK9
  modified_base 21: /mod_base = "5'-thio thymidine"
  modified_base 1..19: /mod_base = "2'-hydroxy corresponding base"
gauuccaugcuccuugacutt

SEQ ID NO: 721 - DNA, 21 bp, Artificial sequence
  siRNAs to PCSK9
  modified_base 3, 4, 11, 13, 18, 19: /mod_base = "2'-O-methyl corresponding base"
  modified_base 21: /mod_base = "5'-thio thymidine"
  modified_base 1, 2, 5, 6, 7, 8, 9, 10, 12, 14, 15, 16, 17: /mod_base = "2'-hydroxy corresponding base"
agucaaggagcauggaauctt

SEQ ID NO: 722 - DNA, 21 bp, Artificial sequence
  siRNAs to PCSK9
  modified_base 6: /mod_base = "2'-O-methyl corresponding base"
  modified_base 21: /mod_base = "5'-thio thymidine"
  modified_base 1, 2, 3, 4, 5, 7, 8, 9, 10, 11, 12, 13, 14, 15, 16, 17, 18, 19: /mod_base = "2'-hydroxy corresponding base"
gauuccaugcuccuugacutt

SEQ ID NO: 723 - DNA, 21 bp, Artificial sequence
  siRNAs to PCSK9
  modified_base 2, 4, 6, 8, 10, 12, 14, 16, 18: /mod_base = "2'-O-methyl corresponding base"
  modified_base 1, 3, 5, 7, 9, 11, 13, 15, 17, 19: /mod_base = "2'-deoxy-2'-fluoro corresponding base"
  modified_base 21: /mod_base = "5'-thio thymidine"
agucaaggagcauggaauctt

SEQ ID NO: 724 - DNA, 21 bp, Artificial sequence
  siRNAs to PCSK9
  modified_base 1, 3, 5, 7, 9, 11, 13, 15, 17, 19: /mod_base = "2'-O-methyl corresponding base"
  modified_base 2, 4, 6, 8, 10, 12, 14, 16, 18: /mod_base = "2'-deoxy-2'-fluoro corresponding base"
  modified_base 21: /mod_base = "5'-thio thymidine"
gauuccaugcuccuugacutt

SEQ ID NO: 725 - DNA, 21 bp, Artificial sequence
  siRNAs to PCSK9
  modified_base 3, 4, 11, 13, 18, 19: /mod_base = "2'-deoxy-2'-fluoro corresponding base"
  modified_base 21: /mod_base = "5'-thio thymidine"
  modified_base 1, 2, 5, 6, 7, 8, 9, 10, 12, 14, 15, 16, 17: /mod_base = "2'-hydroxy corresponding base"
agucaaggagcauggaauctt

SEQ ID NO: 726 - DNA, 21 bp, Artificial sequence
  siRNAs to PCSK9
  modified_base 3, 4, 5, 6, 8, 10, 11, 12, 13, 14, 15, 18, 19: /mod_base = "2'-deoxy-2'-fluoro corresponding base"
  modified_base 21: /mod_base = "5'-thio thymidine"
  modified_base 1, 2, 7, 9, 16, 17: /mod_base = "2'-hydroxy corresponding base"
gauuccaugcuccuugacutt

SEQ ID NO: 727 - DNA, 21 bp, Artificial sequence
  siRNAs to PCSK9
  modified_base 2, 4, 6, 8, 10, 12, 14, 16, 18: /mod_base = "2'-O-methyl corresponding base"
  modified_base 21: /mod_base = "5'-thio thymidine"
  modified_base 1, 3, 5, 7, 9, 11, 13, 15, 17, 19: /mod_base = "2'-hydroxy corresponding base"
agucaaggagcauggaauctt

SEQ ID NO: 728 - DNA, 21 bp, Artificial sequence
  siRNAs to PCSK9
  modified_base 1, 3, 5, 7, 9, 11, 13, 15, 17, 19: /mod_base = "2'-O-methyl corresponding base"
  modified_base 2, 4, 6, 8, 10, 12, 14, 16, 18: /mod_base = "2'-deoxy-2'-fluoro corresponding base"
  modified_base 21: /mod_base = "5'-thio thymidine"
gauuccaugcuccuugacutt

SEQ ID NO: 729 - DNA, 21 bp, Artificial sequence
  siRNAs to PCSK9
  modified_base 2, 4, 6, 8, 10, 12, 14, 16, 18: /mod_base = "2'-O-methyl corresponding base"
  modified_base 21: /mod_base = "5'-thio thymidine"
  modified_base 1, 3, 5, 7, 9, 11, 13, 15, 17, 19: /mod_base = "2'-hydroxy corresponding base"
agucaaggagcauggaauctt

SEQ ID NO: 730 - DNA, 21 bp, Artificial sequence
  siRNAs to PCSK9
  modified_base 3, 4, 5, 6, 8, 10, 11, 12, 13, 14, 15, 18, 19: /mod_base = "2'-deoxy-2'-fluoro corresponding base"
  modified_base 21: /mod_base = "5'-thio thymidine"
  modified_base 1, 2, 7, 9, 16, 17: /mod_base = "2'-hydroxy corresponding base"
gauuccaugcuccuugacutt

SEQ ID NO: 731 - DNA, 21 bp, Artificial sequence
  siRNAs to PCSK9
  modified_base 2, 4, 6, 8, 10, 12, 14, 16, 18: /mod_base = "2'-O-methyl corresponding base"
  modified_base 1, 3, 5, 7, 9, 11, 13, 15, 17, 19: /mod_base = "2'-deoxy-2'-fluoro corresponding base"
  modified_base 21: /mod_base = "5'-thio thymidine"
agucaaggagcauggaauctt

SEQ ID NO: 732 - DNA, 21 bp, Artificial sequence
  siRNAs to PCSK9
  modified_base 6, 7, 10, 11, 17, 18, 19: /mod_base = "2'-O-methyl corresponding base"
  modified_base 21: /mod_base = "5'-thio thymidine"
  modified_base 1, 2, 3, 4, 5, 8, 9, 12, 13, 14, 15, 16: /mod_base = "2'-hydroxy corresponding base"
gauuccaugcuccuugacutt

SEQ ID NO: 733 - DNA, 21 bp, Artificial sequence
  siRNAs to PCSK9
  modified_base 3, 4, 11, 13, 18, 19: /mod_base = "2'-deoxy-2'-fluoro corresponding base"
  modified_base 21: /mod_base = "5'-thio thymidine"
  modified_base 1, 2, 5, 6, 7, 8, 9, 10, 12, 14, 15, 16, 17: /mod_base = "2'-hydroxy corresponding base"
agucaaggagcauggaauctt

SEQ ID NO: 734 - DNA, 21 bp, Artificial sequence
  siRNAs to PCSK9
  modified_base 6, 7, 10, 11, 17, 18, 19: /mod_base = "2'-O-methyl corresponding base"
  modified_base 21: /mod_base = "5'-thio thymidine"
  modified_base 1, 2, 3, 4, 5, 8, 9, 12, 13, 14, 15, 16: /mod_base = "2'-hydroxy corresponding base"
gauuccaugcuccuugacutt

SEQ ID NO: 735 - DNA, 21 bp, Artificial sequence
  siRNAs to PCSK9
  modified_base 2, 4, 6, 8, 10, 12, 14, 16, 18: /mod_base = "2'-O-methyl corresponding base"
  modified_base 21: /mod_base = "5'-thio thymidine"
  modified_base 1, 3, 5, 7, 9, 11, 13, 15, 17, 19: /mod_base = "2'-hydroxy corresponding base"
agucaaggagcauggaauctt

SEQ ID NO: 736 - DNA, 21 bp, Artificial sequence
  siRNAs to PCSK9
  modified_base 6, 7, 10, 11, 17, 18, 19: /mod_base = "2'-O-methyl corresponding base"
  modified_base 21: /mod_base = "5'-thio thymidine"
  modified_base 1, 2, 3, 4, 5, 8, 9, 12, 13, 14, 15, 16: /mod_base = "2'-hydroxy corresponding base"
gauuccaugcuccuugacutt

SEQ ID NO: 737 - DNA, 21 bp, Artificial sequence
  siRNAs to PCSK9
  modified_base 2, 4, 6, 8, 10, 12, 14, 16, 18: /mod_base = "2'-O-methyl corresponding base"
  modified_base 1, 3, 5, 7, 9, 11, 13, 15, 17, 19: /mod_base = "2'-deoxy-2'-fluoro corresponding base"
  modified_base 21: /mod_base = "5'-thio thymidine"
gcggcacccucauaggccutt

SEQ ID NO: 738 - DNA, 21 bp, Artificial sequence
  siRNAs to PCSK9
  modified_base 1, 3, 5, 7, 9, 11, 13, 15, 17, 19: /mod_base = "2'-O-methyl corresponding base"
  modified_base 2, 4, 6, 8, 10, 12, 14, 16, 18: /mod_base = "2'-deoxy-2'-fluoro corresponding base"
  modified_base 21: /mod_base = "5'-thio thymidine"
aggccuaugagggugccgctt

SEQ ID NO: 739 - DNA, 21 bp, Artificial sequence
  siRNAs to PCSK9
  modified_base 2, 5, 7, 8, 9, 10, 11, 13, 17, 18, 19: /mod_base = "2'-deoxy-2'-fluoro corresponding base"
  modified_base 21: /mod_base = "5'-thio thymidine"
  modified_base 1, 3, 4, 6, 12, 14, 15, 16: /mod_base = "2'-hydroxy corresponding base"
gcggcacccucauaggccutt

SEQ ID NO: 740 - DNA, 21 bp, Artificial sequence
  siRNAs to PCSK9
  modified_base 4, 5, 6, 8, 14, 16, 17, 19: /mod_base = "2'-deoxy-2'-fluoro corresponding base"
  modified_base 21: /mod_base = "5'-thio thymidine"
  modified_base 1, 2, 3, 7, 9, 10, 11, 12, 13, 15, 18: /mod_base = "2'-hydroxy corresponding base"
aggccuaugagggugccgctt

SEQ ID NO: 741 - DNA, 21 bp, Artificial sequence
  siRNAs to PCSK9
  modified_base 2, 4, 6, 8, 10, 12, 14, 16, 18: /mod_base = "2'-O-methyl corresponding base"
  modified_base 21: /mod_base = "5'-thio thymidine"
  modified_base 1, 3, 5, 7, 9, 11, 13, 15, 17, 19: /mod_base = "2'-hydroxy corresponding base"
gcggcacccucauaggccutt

SEQ ID NO: 742 - DNA, 21 bp, Artificial sequence
  siRNAs to PCSK9
  modified_base 1, 3, 5, 7, 9, 11, 13, 15, 17, 19: /mod_base = "2'-O-methyl corresponding base"
  modified_base 2, 4, 6, 8, 10, 12, 14, 16, 18: /mod_base = "2'-deoxy-2'-fluoro corresponding base"
  modified_base 21: /mod_base = "5'-thio thymidine"
aggccuaugagggugccgctt

SEQ ID NO: 743 - DNA, 21 bp, Artificial sequence
  siRNAs to PCSK9
  modified_base 2, 4, 6, 8, 10, 12, 14, 16, 18: /mod_base = "2'-O-methyl corresponding base"
  modified_base 21: /mod_base = "5'-thio thymidine"
  modified_base 1, 3, 5, 7, 9, 11, 13, 15, 17, 19: /mod_base = "2'-hydroxy corresponding base"
gcggcacccucauaggccutt

SEQ ID NO: 744 - DNA, 21 bp, Artificial sequence
  siRNAs to PCSK9
  modified_base 4, 5, 6, 8, 14, 16, 17, 19: /mod_base = "2'-deoxy-2'-fluoro corresponding base"
  modified_base 21: /mod_base = "5'-thio thymidine"
  modified_base 1, 2, 3, 7, 9, 10, 11, 12, 13, 15, 18: /mod_base = "2'-hydroxy corresponding base"
aggccuaugagggugccgctt

SEQ ID NO: 745 - DNA, 21 bp, Artificial sequence
  siRNAs to PCSK9
  modified_base 2, 4, 6, 8, 10, 12, 14, 16, 18: /mod_base = "2'-O-methyl corresponding base"
  modified_base 1, 3, 5, 7, 9, 11, 13, 15, 17, 19: /mod_base = "2'-deoxy-2'-fluoro corresponding base"
  modified_base 21: /mod_base = "5'-thio thymidine"
gcggcacccucauaggccutt

SEQ ID NO: 746 - DNA, 21 bp, Artificial sequence
  siRNAs to PCSK9
  modified_base 6, 7, 10, 11, 17, 18, 19: /mod_base = "2'-O-methyl corresponding base"
  modified_base 21: /mod_base = "5'-thio thymidine"
  modified_base 1, 2, 3, 4, 5, 8, 9, 12, 13, 14, 15, 16: /mod_base = "2'-hydroxy corresponding base"
aggccuaugagggugccgctt

SEQ ID NO: 747 - DNA, 21 bp, Artificial sequence
  siRNAs to PCSK9
  modified_base 2, 5, 7, 8, 9, 10, 11, 13, 17, 18, 19: /mod_base = "2'-deoxy-2'-fluoro corresponding base"
  modified_base 21: /mod_base = "5'-thio thymidine"
  modified_base 1, 3, 4, 6, 12, 14, 15, 16: /mod_base = "2'-hydroxy corresponding base"
gcggcacccucauaggccutt

SEQ ID NO: 748 - DNA, 21 bp, Artificial sequence
  siRNAs to PCSK9
  modified_base 6, 7, 10, 11, 17, 18, 19: /mod_base = "2'-O-methyl corresponding base"
  modified_base 21: /mod_base = "5'-thio thymidine"
  modified_base 1, 2, 3, 4, 5, 8, 9, 12, 13, 14, 15, 16: /mod_base = "2'-hydroxy corresponding base"
aggccuaugagggugccgctt

SEQ ID NO: 749 - DNA, 21 bp, Artificial sequence
  siRNAs to PCSK9
  modified_base 2, 4, 6, 8, 10, 12, 14, 16, 18: /mod_base = "2'-O-methyl corresponding base"
  modified_base 21: /mod_base = "5'-thio thymidine"
  modified_base 1, 3, 5, 7, 9, 11, 13, 15, 17, 19: /mod_base = "2'-hydroxy corresponding base"
gcggcacccucauaggccutt

SEQ ID NO: 750 - DNA, 21 bp, Artificial sequence
  siRNAs to PCSK9
  modified_base 6, 7, 10, 11, 17, 18, 19: /mod_base = "2'-O-methyl corresponding base"
  modified_base 21: /mod_base = "5'-thio thymidine"
  modified_base 1, 2, 3, 4, 5, 8, 9, 12, 13, 14, 15, 16: /mod_base = "2'-hydroxy corresponding base"
aggccuaugagggugccgctt

SEQ ID NO: 751 - DNA, 21 bp, Artificial sequence
  siRNAs to PCSK9
  modified_base 21: /mod_base = "5'-thio thymidine"
  modified_base 1..19: /mod_base = "2'-hydroxy corresponding base"
aaggagcauggaaucccggtt

SEQ ID NO: 752 - DNA, 21 bp, Artificial sequence
  siRNAs to PCSK9
  modified_base 21: /mod_base = "5'-thio thymidine"
  modified_base 1..19: /mod_base = "2'-hydroxy corresponding base"
ccgggauuccaugcuccuutt

SEQ ID NO: 753 - DNA, 21 bp, Artificial sequence
  siRNAs to PCSK9
  modified_base 7, 9, 14, 15, 16, 17: /mod_base = "2'-O-methyl corresponding base"
  modified_base 21: /mod_base = "5'-thio thymidine"
  modified_base 1, 2, 3, 4, 5, 6, 8, 10, 11, 12, 13, 18, 19: /mod_base = "2'-hydroxy corresponding base"
aaggagcauggaaucccggtt

SEQ ID NO: 754 - DNA, 21 bp, Artificial sequence
  siRNAs to PCSK9
  modified_base 10: /mod_base = "2'-O-methyl corresponding base"
  modified_base 21: /mod_base = "5'-thio thymidine"
  modified_base 1, 2, 3, 4, 5, 6, 7, 8, 9, 11, 12, 13, 14, 15, 16, 17, 18, 19: /mod_base = "2'-hydroxy corresponding base"
ccgggauuccaugcuccuutt

SEQ ID NO: 755 - DNA, 21 bp, Artificial sequence
  siRNAs to PCSK9
  modified_base 21: /mod_base = "5'-thio thymidine"
  modified_base 1..19: /mod_base = "2'-hydroxy corresponding base"
aggagcauggaaucccggctt

SEQ ID NO: 756 - DNA, 21 bp, Artificial sequence
  siRNAs to PCSK9
  modified_base 21: /mod_base = "5'-thio thymidine"
  modified_base 1..19: /mod_base = "2'-hydroxy corresponding base"
gccgggauuccaugcuccutt

SEQ ID NO: 757 - DNA, 21 bp, Artificial sequence
  siRNAs to PCSK9
  modified_base 6, 8, 13, 14, 15, 16, 19: /mod_base = "2'-O-methyl corresponding base"
  modified_base 21: /mod_base = "5'-thio thymidine"
  modified_base 1, 2, 3, 4, 5, 7, 9, 10, 11, 12, 17, 18: /mod_base = "2'-hydroxy corresponding base"
aggagcauggaaucccggctt

SEQ ID NO: 758 - DNA, 21 bp, Artificial sequence
  siRNAs to PCSK9
  modified_base 11: /mod_base = "2'-O-methyl corresponding base"
  modified_base 21: /mod_base = "5'-thio thymidine"
  modified_base 1, 2, 3, 4, 5, 6, 7, 8, 9, 10, 12, 13, 14, 15, 16, 17, 18, 19: /mod_base = "2'-hydroxy corresponding base"
gccgggauuccaugcuccutt

SEQ ID NO: 759 - DNA, 21 bp, Artificial sequence
  siRNAs to PCSK9
  modified_base 21: /mod_base = "5'-thio thymidine"
  modified_base 1..19: /mod_base = "2'-hydroxy corresponding base"
gagcauggaaucccggccctt

SEQ ID NO: 760 - DNA, 21 bp, Artificial sequence
  siRNAs to PCSK9
  modified_base 21: /mod_base = "5'-thio thymidine"
  modified_base 1..19: /mod_base = "2'-hydroxy corresponding base"
gggccgggauuccaugcuctt

SEQ ID NO: 761 - DNA, 21 bp, Artificial sequence
  siRNAs to PCSK9
  modified_base 4, 6, 11, 12, 13, 14, 17, 18, 19: /mod_base = "2'-O-methyl corresponding base"
  modified_base 21: /mod_base = "5'-thio thymidine"
  modified_base 1, 2, 3, 5, 7, 8, 9, 10, 15, 16: /mod_base = "2'-hydroxy corresponding base"
gagcauggaaucccggccctt

SEQ ID NO: 762 - DNA, 21 bp, Artificial sequence
  siRNAs to PCSK9
  modified_base 13: /mod_base = "2'-O-methyl corresponding base"
  modified_base 21: /mod_base = "5'-thio thymidine"
  modified_base 1, 2, 3, 4, 5, 6, 7, 8, 9, 10, 11, 12, 14, 15, 16, 17, 18, 19: /mod_base = "2'-hydroxy corresponding base"
gggccgggauuccaugcuctt

SEQ ID NO: 763 - DNA, 21 bp, Artificial sequence
  siRNAs to PCSK9
  modified_base 1..19: /mod_base = "2'-hydroxy corresponding base"
gccuacgccguagacaacatt

SEQ ID NO: 764 - DNA, 21 bp, Artificial sequence
  siRNAs to PCSK9
  modified_base 1..19: /mod_base = "2'-hydroxy corresponding base"
uguugucuacggcguaggctt

SEQ ID NO: 765 - DNA, 21 bp, Artificial sequence
  siRNAs to PCSK9
  modified_base 1..19: /mod_base = "2'-hydroxy corresponding base"
ccuacgccguagacaacactt

SEQ ID NO: 766 - DNA, 21 bp, Artificial sequence
  siRNAs to PCSK9
  modified_base 1..19: /mod_base = "2'-hydroxy corresponding base"
guguugucuacggcguaggtt

SEQ ID NO: 767 - DNA, 21 bp, Artificial sequence
  siRNAs to PCSK9
  modified_base 1..19: /mod_base = "2'-hydroxy corresponding base"
cuacgccguagacaacacgtt

SEQ ID NO: 768 - DNA, 21 bp, Artificial sequence
  siRNAs to PCSK9
  modified_base 1..19: /mod_base = "2'-hydroxy corresponding base"
cguguugucuacggcguagtt

SEQ ID NO: 769 - DNA, 21 bp, Artificial sequence
  siRNAs to PCSK9
  modified_base 1..19: /mod_base = "2'-hydroxy corresponding base"
uacgccguagacaacacgutt

SEQ ID NO: 770 - DNA, 21 bp, Artificial sequence
  siRNAs to PCSK9
  modified_base 1..19: /mod_base = "2'-hydroxy corresponding base"
acguguugucuacggcguatt

SEQ ID NO: 771 - DNA, 21 bp, Artificial sequence
  siRNAs to PCSK9
  modified_base 1..19: /mod_base = "2'-hydroxy corresponding base"
cgccguagacaacacgugutt

SEQ ID NO: 772 - DNA, 21 bp, Artificial sequence
  siRNAs to PCSK9
  modified_base 1..19: /mod_base = "2'-hydroxy corresponding base"
acacguguugucuacggcgtt

SEQ ID NO: 773 - DNA, 21 bp, Artificial sequence
  siRNAs to PCSK9
  modified_base 1..19: /mod_base = "2'-hydroxy corresponding base"
gccguagacaacacgugugtt

SEQ ID NO: 774 - DNA, 21 bp, Artificial sequence
  siRNAs to PCSK9
  modified_base 1..19: /mod_base = "2'-hydroxy corresponding base"
cacacguguugucuacggctt

SEQ ID NO: 775 - DNA, 21 bp, Artificial sequence
  siRNAs to PCSK9
  modified_base 1..19: /mod_base = "2'-hydroxy corresponding base"
ccguagacaacacgugugutt

SEQ ID NO: 776 - DNA, 21 bp, Artificial sequence
  siRNAs to PCSK9
  modified_base 1..19: /mod_base = "2'-hydroxy corresponding base"
acacacguguugucuacggtt

SEQ ID NO: 777 - DNA, 21 bp, Artificial sequence
  siRNAs to PCSK9
  modified_base 1..19: /mod_base = "2'-hydroxy corresponding base"
cguagacaacacguguguatt

SEQ ID NO: 778 - DNA, 21 bp, Artificial sequence
  siRNAs to PCSK9
  modified_base 1..19: /mod_base = "2'-hydroxy corresponding base"
uacacacguguugucuacgtt

SEQ ID NO: 779 - DNA, 21 bp, Artificial sequence
  siRNAs to PCSK9
  modified_base 1..19: /mod_base = "2'-hydroxy corresponding base"
uagacaacacguguguagutt

SEQ ID NO: 780 - DNA, 21 bp, Artificial sequence
  siRNAs to PCSK9
  modified_base 1..19: /mod_base = "2'-hydroxy corresponding base"
acuacacacguguugucuatt

SEQ ID NO: 781 - DNA, 21 bp, Artificial sequence
  siRNAs to PCSK9
  modified_base 1..19: /mod_base = "2'-hydroxy corresponding base"
agacaacacguguguaguctt

SEQ ID NO: 782 - DNA, 21 bp, Artificial sequence
  siRNAs to PCSK9
  modified_base 1..19: /mod_base = "2'-hydroxy corresponding base"
gacuacacacguguugucutt

SEQ ID NO: 783 - DNA, 21 bp, Artificial sequence
  siRNAs to PCSK9
  modified_base 1..19: /mod_base = "2'-hydroxy corresponding base"
gacaacacguguguagucatt

SEQ ID NO: 784 - DNA, 21 bp, Artificial sequence
  siRNAs to PCSK9
  modified_base 1..19: /mod_base = "2'-hydroxy corresponding base"
ugacuacacacguguuguctt

SEQ ID NO: 785 - DNA, 21 bp, Artificial sequence
  siRNAs to PCSK9
  modified_base 1..19: /mod_base = "2'-hydroxy corresponding base"
acaacacguguguagucagtt

SEQ ID NO: 786 - DNA, 21 bp, Artificial sequence
  siRNAs to PCSK9
  modified_base 1..19: /mod_base = "2'-hydroxy corresponding base"
cugacuacacacguguugutt

SEQ ID NO: 787 - DNA, 21 bp, Artificial sequence
  siRNAs to PCSK9
  modified_base 1..19: /mod_base = "2'-hydroxy corresponding base"
caacacguguguagucaggtt

SEQ ID NO: 788 - DNA, 21 bp, Artificial sequence
  siRNAs to PCSK9
  modified_base 1..19: /mod_base = "2'-hydroxy corresponding base"
ccugacuacacacguguugtt

SEQ ID NO: 789 - DNA, 21 bp, Artificial sequence
  siRNAs to PCSK9
  modified_base 1..19: /mod_base = "2'-hydroxy corresponding base"
cacguguguagucaggagctt

SEQ ID NO: 790 - DNA, 21 bp, Artificial sequence
  siRNAs to PCSK9
  modified_base 1..19: /mod_base = "2'-hydroxy corresponding base"
gcuccugacuacacacgugtt

SEQ ID NO: 791 - DNA, 21 bp, Artificial sequence
  siRNAs to PCSK9
  modified_base 1..19: /mod_base = "2'-hydroxy corresponding base"
acguguguagucaggagcctt

SEQ ID NO: 792 - DNA, 21 bp, Artificial sequence
  siRNAs to PCSK9
  modified_base 1..19: /mod_base = "2'-hydroxy corresponding base"
ggcuccugacuacacacgutt

SEQ ID NO: 793 - DNA, 21 bp, Artificial sequence
  siRNAs to PCSK9
  modified_base 1..19: /mod_base = "2'-hydroxy corresponding base"
cguguguagucaggagccgtt

SEQ ID NO: 794 - DNA, 21 bp, Artificial sequence
  siRNAs to PCSK9
  modified_base 1..19: /mod_base = "2'-hydroxy corresponding base"
cggcuccugacuacacacgtt

SEQ ID NO: 795 - DNA, 21 bp, Artificial sequence
  siRNAs to PCSK9
  modified_base 1..19: /mod_base = "2'-hydroxy corresponding base"
uguguagucaggagccgggtt

SEQ ID NO: 796 - DNA, 21 bp, Artificial sequence
  siRNAs to PCSK9
  modified_base 1..19: /mod_base = "2'-hydroxy corresponding base"
cccggcuccugacuacacatt

SEQ ID NO: 797 - DNA, 21 bp, Artificial sequence
  siRNAs to PCSK9
  modified_base 21: /mod_base = "5'-thio thymidine"
  modified_base 1..19: /mod_base = "2'-hydroxy corresponding base"
gucaggagccgggacgucatt

SEQ ID NO: 798 - DNA, 21 bp, Artificial sequence
  siRNAs to PCSK9
  modified_base 21: /mod_base = "5'-thio thymidine"
  modified_base 1..19: /mod_base = "2'-hydroxy corresponding base"
ugacgucccggcuccugactt

SEQ ID NO: 799 - DNA, 21 bp, Artificial sequence
  siRNAs to PCSK9
  modified_base 2, 3, 9, 10, 15, 17, 18: /mod_base = "2'-O-methyl corresponding base"
  modified_base 21: /mod_base = "5'-thio thymidine"
  modified_base 1, 4, 5, 6, 7, 8, 11, 12, 13, 14, 16, 19: /mod_base = "2'-hydroxy corresponding base"
gucaggagccgggacgucatt

SEQ ID NO: 800 - DNA, 21 bp, Artificial sequence
  siRNAs to PCSK9
  modified_base 21: /mod_base = "5'-thio thymidine"
  modified_base 1..19: /mod_base = "2'-hydroxy corresponding base"
ugacgucccggcuccugactt

SEQ ID NO: 801 - DNA, 21 bp, Artificial sequence
  siRNAs to PCSK9
  modified_base 21: /mod_base = "5'-thio thymidine"
  modified_base 1..19: /mod_base = "2'-hydroxy corresponding base"
ucaggagccgggacgucagtt

SEQ ID NO: 802 - DNA, 21 bp, Artificial sequence
  siRNAs to PCSK9
  modified_base 21: /mod_base = "5'-thio thymidine"
  modified_base 1..19: /mod_base = "2'-hydroxy corresponding base"
cugacgucccggcuccugatt

SEQ ID NO: 803 - DNA, 21 bp, Artificial sequence
  siRNAs to PCSK9
  modified_base 1, 2, 8, 9, 14, 16, 17: /mod_base = "2'-O-methyl corresponding base"
  modified_base 21: /mod_base = "5'-thio thymidine"
  modified_base 3, 4, 5, 6, 7, 10, 11, 12, 13, 15, 18, 19: /mod_base = "2'-hydroxy corresponding base"
ucaggagccgggacgucagtt

SEQ ID NO: 804 - DNA, 21 bp, Artificial sequence
  siRNAs to PCSK9
  modified_base 21: /mod_base = "5'-thio thymidine"
  modified_base 1..19: /mod_base = "2'-hydroxy corresponding base"
cugacgucccggcuccugatt

SEQ ID NO: 805 - DNA, 21 bp, Artificial sequence
  siRNAs to PCSK9
  modified_base 21: /mod_base = "5'-thio thymidine"
  modified_base 1..19: /mod_base = "2'-hydroxy corresponding base"
caggagccgggacgucagctt

SEQ ID NO: 806 - DNA, 21 bp, Artificial sequence
  siRNAs to PCSK9
  modified_base 21: /mod_base = "5'-thio thymidine"
  modified_base 1..19: /mod_base = "2'-hydroxy corresponding base"
gcugacgucccggcuccugtt

SEQ ID NO: 807 - DNA, 21 bp, Artificial sequence
  siRNAs to PCSK9
  modified_base 1, 7, 8, 13, 15, 16, 19: /mod_base = "2'-O-methyl corresponding base"
  modified_base 21: /mod_base = "5'-thio thymidine"
  modified_base 2, 3, 4, 5, 6, 9, 10, 11, 12, 14, 17, 18: /mod_base = "2'-hydroxy corresponding base"
caggagccgggacgucagctt

SEQ ID NO: 808 - DNA, 21 bp, Artificial sequence
  siRNAs to PCSK9
  modified_base 21: /mod_base = "5'-thio thymidine"
  modified_base 1..19: /mod_base = "2'-hydroxy corresponding base"
gcugacgucccggcuccugtt

SEQ ID NO: 809 - DNA, 21 bp, Artificial sequence
  siRNAs to PCSK9
  modified_base 1..19: /mod_base = "2'-hydroxy corresponding base"
agccgggacgucagcacuatt

SEQ ID NO: 810 - DNA, 21 bp, Artificial sequence
  siRNAs to PCSK9
  modified_base 1..19: /mod_base = "2'-hydroxy corresponding base"
uagugcugacgucccggcutt

SEQ ID NO: 811 - DNA, 21 bp, Artificial sequence
  siRNAs to PCSK9
  modified_base 1..19: /mod_base = "2'-hydroxy corresponding base"
ccgggacgucagcacuacatt

SEQ ID NO: 812 - DNA, 21 bp, Artificial sequence
  siRNAs to PCSK9
  modified_base 1..19: /mod_base = "2'-hydroxy corresponding base"
uguagugcugacgucccggtt

SEQ ID NO: 813 - DNA, 21 bp, Artificial sequence
  siRNAs to PCSK9
  modified_base 1..19: /mod_base = "2'-hydroxy corresponding base"
ccgugacagccguugccautt

SEQ ID NO: 814 - DNA, 21 bp, Artificial sequence
  siRNAs to PCSK9
  modified_base 1..19: /mod_base = "2'-hydroxy corresponding base"
auggcaacggcugucacggtt

SEQ ID NO: 815 - DNA, 21 bp, Artificial sequence
  siRNAs to PCSK9
  modified_base 21: /mod_base = "5'-thio thymidine"
  modified_base 1..19: /mod_base = "2'-hydroxy corresponding base"
gccaucugcugccggagcctt

SEQ ID NO: 816 - DNA, 21 bp, Artificial sequence
  siRNAs to PCSK9
  modified_base 21: /mod_base = "5'-thio thymidine"
  modified_base 1..19: /mod_base = "2'-hydroxy corresponding base"
ggcuccggcagcagauggctt

SEQ ID NO: 817 - DNA, 21 bp, Artificial sequence
  siRNAs to PCSK9
  modified_base 1..19: /mod_base = "2'-hydroxy corresponding base"
cccaucccaggaugggugutt

SEQ ID NO: 818 - DNA, 21 bp, Artificial sequence
  siRNAs to PCSK9
  modified_base 1..19: /mod_base = "2'-hydroxy corresponding base"
acacccauccugggaugggtt

SEQ ID NO: 819 - DNA, 21 bp, Artificial sequence
  siRNAs to PCSK9
  modified_base 1..19: /mod_base = "2'-hydroxy corresponding base"
caucccaggaugggugucutt

SEQ ID NO: 820 - DNA, 21 bp, Artificial sequence
  siRNAs to PCSK9
  modified_base 1..19: /mod_base = "2'-hydroxy corresponding base"
agacacccauccugggaugtt

SEQ ID NO: 821 - DNA, 21 bp, Artificial sequence
  siRNAs to PCSK9
  modified_base 1..19: /mod_base = "2'-hydroxy corresponding base"
agcuuuaaaaugguuccgatt

SEQ ID NO: 822 - DNA, 21 bp, Artificial sequence
  siRNAs to PCSK9
  modified_base 1..19: /mod_base = "2'-hydroxy corresponding base"
ucggaaccauuuuaaagcutt

SEQ ID NO: 823 - DNA, 21 bp, Artificial sequence
  siRNAs to PCSK9
  modified_base 1..19: /mod_base = "2'-hydroxy corresponding base"
gcuuuaaaaugguuccgactt

SEQ ID NO: 824 - DNA, 21 bp, Artificial sequence
  siRNAs to PCSK9
  modified_base 1..19: /mod_base = "2'-hydroxy corresponding base"
gucggaaccauuuuaaagctt

SEQ ID NO: 825 - DNA, 21 bp, Artificial sequence
  siRNAs to PCSK9
  modified_base 1..19: /mod_base = "2'-hydroxy corresponding base"
cuuuaaaaugguuccgacutt

SEQ ID NO: 826 - DNA, 21 bp, Artificial sequence
  siRNAs to PCSK9
  modified_base 1..19: /mod_base = "2'-hydroxy corresponding base"
agucggaaccauuuuaaagtt

SEQ ID NO: 827 - DNA, 21 bp, Artificial sequence
  siRNAs to PCSK9
  modified_base 1..19: /mod_base = "2'-hydroxy corresponding base"
uuuaaaaugguuccgacuutt

SEQ ID NO: 828 - DNA, 21 bp, Artificial sequence
  siRNAs to PCSK9
  modified_base 1..19: /mod_base = "2'-hydroxy corresponding base"
aagucggaaccauuuuaaatt

SEQ ID NO: 829 - DNA, 21 bp, Artificial sequence
  siRNAs to PCSK9
  modified_base 1..19: /mod_base = "2'-hydroxy corresponding base"
uuaaaaugguuccgacuugtt

SEQ ID NO: 830 - DNA, 21 bp, Artificial sequence
  siRNAs to PCSK9
  modified_base 1..19: /mod_base = "2'-hydroxy corresponding base"
caagucggaaccauuuuaatt

SEQ ID NO: 831 - DNA, 21 bp, Artificial sequence
  siRNAs to PCSK9
  modified_base 1..19: /mod_base = "2'-hydroxy corresponding base"
uaaaaugguuccgacuugutt

SEQ ID NO: 832 - DNA, 21 bp, Artificial sequence
  siRNAs to PCSK9
  modified_base 1..19: /mod_base = "2'-hydroxy corresponding base"
acaagucggaaccauuuuatt

SEQ ID NO: 833 - DNA, 21 bp, Artificial sequence
  siRNAs to PCSK9
  modified_base 1..19: /mod_base = "2'-hydroxy corresponding base"
aaaaugguuccgacuuguctt

SEQ ID NO: 834 - DNA, 21 bp, Artificial sequence
  siRNAs to PCSK9
  modified_base 1..19: /mod_base = "2'-hydroxy corresponding base"
gacaagucggaaccauuuutt

SEQ ID NO: 835 - DNA, 21 bp, Artificial sequence
  siRNAs to PCSK9
  modified_base 1..19: /mod_base = "2'-hydroxy corresponding base"
aaaugguuccgacuugucctt

SEQ ID NO: 836 - DNA, 21 bp, Artificial sequence
  siRNAs to PCSK9
  modified_base 1..19: /mod_base = "2'-hydroxy corresponding base"
ggacaagucggaaccauuutt

SEQ ID NO: 837 - DNA, 21 bp, Artificial sequence
  siRNAs to PCSK9
  modified_base 1..19: /mod_base = "2'-hydroxy corresponding base"
aaugguuccgacuuguccctt

SEQ ID NO: 838 - DNA, 21 bp, Artificial sequence
  siRNAs to PCSK9
  modified_base 1..19: /mod_base = "2'-hydroxy corresponding base"
gggacaagucggaaccauutt

SEQ ID NO: 839 - DNA, 21 bp, Artificial sequence
  siRNAs to PCSK9
  modified_base 1..19: /mod_base = "2'-hydroxy corresponding base"
gguuccgacuugucccucutt

SEQ ID NO: 840 - DNA, 21 bp, Artificial sequence
  siRNAs to PCSK9
  modified_base 1..19: /mod_base = "2'-hydroxy corresponding base"
agagggacaagucggaacctt

SEQ ID NO: 841 - DNA, 21 bp, Artificial sequence
  siRNAs to PCSK9
  modified_base 1..19: /mod_base = "2'-hydroxy corresponding base"
cuccauggccuggcacgagtt

SEQ ID NO: 842 - DNA, 21 bp, Artificial sequence
  siRNAs to PCSK9
  modified_base 1..19: /mod_base = "2'-hydroxy corresponding base"
cucgugccaggccauggagtt

SEQ ID NO: 843 - DNA, 21 bp, Artificial sequence
  siRNAs to PCSK9
  modified_base 1..19: /mod_base = "2'-hydroxy corresponding base"
ccauggccuggcacgagggtt

SEQ ID NO: 844 - DNA, 21 bp, Artificial sequence
  siRNAs to PCSK9
  modified_base 1..19: /mod_base = "2'-hydroxy corresponding base"
cccucgugccaggccauggtt

SEQ ID NO: 845 - DNA, 21 bp, Artificial sequence
  siRNAs to PCSK9
  modified_base 1..19: /mod_base = "2'-hydroxy corresponding base"
gaacucacucacucugggutt

SEQ ID NO: 846 - DNA, 21 bp, Artificial sequence
  siRNAs to PCSK9
  modified_base 1..19: /mod_base = "2'-hydroxy corresponding base"
acccagagugagugaguuctt

SEQ ID NO: 847 - DNA, 21 bp, Artificial sequence
  siRNAs to PCSK9
  modified_base 1..19: /mod_base = "2'-hydroxy corresponding base"
ucacucacucugggugccutt

SEQ ID NO: 848 - DNA, 21 bp, Artificial sequence
  siRNAs to PCSK9
  modified_base 1..19: /mod_base = "2'-hydroxy corresponding base"
aggcacccagagugagugatt

SEQ ID NO: 849 - DNA, 21 bp, Artificial sequence
  siRNAs to PCSK9
  modified_base 1..19: /mod_base = "2'-hydroxy corresponding base"
uuucaccauucaaacaggutt

SEQ ID NO: 850 - DNA, 21 bp, Artificial sequence
  siRNAs to PCSK9
  modified_base 1..19: /mod_base = "2'-hydroxy corresponding base"
accuguuugaauggugaaatt

SEQ ID NO: 851 - DNA, 21 bp, Artificial sequence
  siRNAs to PCSK9
  modified_base 1..19: /mod_base = "2'-hydroxy corresponding base"
cauucaaacaggucgagcutt

SEQ ID NO: 852 - DNA, 21 bp, Artificial sequence
  siRNAs to PCSK9
  modified_base 1..19: /mod_base = "2'-hydroxy corresponding base"
agcucgaccuguuugaaugtt

SEQ ID NO: 853 - DNA, 21 bp, Artificial sequence
  siRNAs to PCSK9
  modified_base 1..19: /mod_base = "2'-hydroxy corresponding base"
auucaaacaggucgagcugtt

SEQ ID NO: 854 - DNA, 21 bp, Artificial sequence
  siRNAs to PCSK9
  modified_base 1..19: /mod_base = "2'-hydroxy corresponding base"
cagcucgaccuguuugaautt

SEQ ID NO: 855 - DNA, 21 bp, Artificial sequence
  siRNAs to PCSK9
  modified_base 1..19: /mod_base = "2'-hydroxy corresponding base"
uucaaacaggucgagcugutt

SEQ ID NO: 856 - DNA, 21 bp, Artificial sequence
  siRNAs to PCSK9
  modified_base 1..19: /mod_base = "2'-hydroxy corresponding base"
acagcucgaccuguuugaatt

SEQ ID NO: 857 - DNA, 21 bp, Artificial sequence
  siRNAs to PCSK9
  modified_base 1..19: /mod_base = "2'-hydroxy corresponding base"
ucaaacaggucgagcugugtt

SEQ ID NO: 858 - DNA, 21 bp, Artificial sequence
  siRNAs to PCSK9
  modified_base 1..19: /mod_base = "2'-hydroxy corresponding base"
cacagcucgaccuguuugatt

SEQ ID NO: 859 - DNA, 21 bp, Artificial sequence
  siRNAs to PCSK9
  modified_base 1..19: /mod_base = "2'-hydroxy corresponding base"
caaacaggucgagcugugctt

SEQ ID NO: 860 - DNA, 21 bp, Artificial sequence
  siRNAs to PCSK9
  modified_base 1..19: /mod_base = "2'-hydroxy corresponding base"
gcacagcucgaccuguuugtt

SEQ ID NO: 861 - DNA, 21 bp, Artificial sequence
  siRNAs to PCSK9
  modified_base 1..19: /mod_base = "2'-hydroxy corresponding base"
aaacaggucgagcugugcutt

SEQ ID NO: 862 - DNA, 21 bp, Artificial sequence
  siRNAs to PCSK9
  modified_base 1..19: /mod_base = "2'-hydroxy corresponding base"
agcacagcucgaccuguuutt

SEQ ID NO: 863 - DNA, 21 bp, Artificial sequence
  siRNAs to PCSK9
  modified_base 1..19: /mod_base = "2'-hydroxy corresponding base"
aacaggucgagcugugcuctt

SEQ ID NO: 864 - DNA, 21 bp, Artificial sequence
  siRNAs to PCSK9
  modified_base 1..19: /mod_base = "2'-hydroxy corresponding base"
gagcacagcucgaccuguutt

SEQ ID NO: 865 - DNA, 21 bp, Artificial sequence
  siRNAs to PCSK9
  modified_base 1..19: /mod_base = "2'-hydroxy corresponding base"
caggucgagcugugcucggtt

SEQ ID NO: 866 - DNA, 21 bp, Artificial sequence
  siRNAs to PCSK9
  modified_base 1..19: /mod_base = "2'-hydroxy corresponding base"
ccgagcacagcucgaccugtt

SEQ ID NO: 867 - DNA, 21 bp, Artificial sequence
  siRNAs to PCSK9
  modified_base 1..19: /mod_base = "2'-hydroxy corresponding base"
aggucgagcugugcucgggtt

SEQ ID NO: 868 - DNA, 21 bp, Artificial sequence
  siRNAs to PCSK9
  modified_base 1..19: /mod_base = "2'-hydroxy corresponding base"
cccgagcacagcucgaccutt

SEQ ID NO: 869 - DNA, 21 bp, Artificial sequence
  siRNAs to PCSK9
  modified_base 1..19: /mod_base = "2'-hydroxy corresponding base"
gucgagcugugcucgggugtt

SEQ ID NO: 870 - DNA, 21 bp, Artificial sequence
  siRNAs to PCSK9
  modified_base 1..19: /mod_base = "2'-hydroxy corresponding base"
cacccgagcacagcucgactt

SEQ ID NO: 871 - DNA, 21 bp, Artificial sequence
  siRNAs to PCSK9
  modified_base 1..19: /mod_base = "2'-hydroxy corresponding base"
ucgagcugugcucgggugctt

SEQ ID NO: 872 - DNA, 21 bp, Artificial sequence
  siRNAs to PCSK9
  modified_base 1..19: /mod_base = "2'-hydroxy corresponding base"
gcacccgagcacagcucgatt

SEQ ID NO: 873 - DNA, 21 bp, Artificial sequence
  siRNAs to PCSK9
  modified_base 1..19: /mod_base = "2'-hydroxy corresponding base"
agcugcucccaaugugccgtt

SEQ ID NO: 874 - DNA, 21 bp, Artificial sequence
  siRNAs to PCSK9
  modified_base 1..19: /mod_base = "2'-hydroxy corresponding base"
cggcacauugggagcagcutt

SEQ ID NO: 875 - DNA, 21 bp, Artificial sequence
  siRNAs to PCSK9
  modified_base 1..19: /mod_base = "2'-hydroxy corresponding base"
gcugcucccaaugugccgatt

SEQ ID NO: 876 - DNA, 21 bp, Artificial sequence
  siRNAs to PCSK9
  modified_base 1..19: /mod_base = "2'-hydroxy corresponding base"
ucggcacauugggagcagctt

SEQ ID NO: 877 - DNA, 21 bp, Artificial sequence
  siRNAs to PCSK9
  modified_base 1..19: /mod_base = "2'-hydroxy corresponding base"
ugcucccaaugugccgaugtt

SEQ ID NO: 878 - DNA, 21 bp, Artificial sequence
  siRNAs to PCSK9
  modified_base 1..19: /mod_base = "2'-hydroxy corresponding base"
caucggcacauugggagcatt

SEQ ID NO: 879 - DNA, 21 bp, Artificial sequence
  siRNAs to PCSK9
  modified_base 1..19: /mod_base = "2'-hydroxy corresponding base"
ucccaaugugccgaugucctt

SEQ ID NO: 880 - DNA, 21 bp, Artificial sequence
  siRNAs to PCSK9
  modified_base 1..19: /mod_base = "2'-hydroxy corresponding base"
ggacaucggcacauugggatt

SEQ ID NO: 881 - DNA, 21 bp, Artificial sequence
  siRNAs to PCSK9
  modified_base 1..19: /mod_base = "2'-hydroxy corresponding base"
ccaaugugccgauguccgutt

SEQ ID NO: 882 - DNA, 21 bp, Artificial sequence
  siRNAs to PCSK9
  modified_base 1..19: /mod_base = "2'-hydroxy corresponding base"
acggacaucggcacauuggtt

SEQ ID NO: 883 - DNA, 21 bp, Artificial sequence
  siRNAs to PCSK9
  modified_base 1..19: /mod_base = "2'-hydroxy corresponding base"
caaugugccgauguccgugtt

SEQ ID NO: 884 - DNA, 21 bp, Artificial sequence
  siRNAs to PCSK9
  modified_base 1..19: /mod_base = "2'-hydroxy corresponding base"
cacggacaucggcacauugtt

SEQ ID NO: 885 - DNA, 21 bp, Artificial sequence
  siRNAs to PCSK9
  modified_base 1..19: /mod_base = "2'-hydroxy corresponding base"
aaugugccgauguccguggtt

SEQ ID NO: 886 - DNA, 21 bp, Artificial sequence
  siRNAs to PCSK9
  modified_base 1..19: /mod_base = "2'-hydroxy corresponding base"
ccacggacaucggcacauutt

SEQ ID NO: 887 - DNA, 21 bp, Artificial sequence
  siRNAs to PCSK9
  modified_base 1..19: /mod_base = "2'-hydroxy corresponding base"
ccgauguccgugggcagaatt

SEQ ID NO: 888 - DNA, 21 bp, Artificial sequence
  siRNAs to PCSK9
  modified_base 1..19: /mod_base = "2'-hydroxy corresponding base"
uucugcccacggacaucggtt

SEQ ID NO: 889 - DNA, 21 bp, Artificial sequence
  siRNAs to PCSK9
  modified_base 1..19: /mod_base = "2'-hydroxy corresponding base"
gauguccgugggcagaaugtt

SEQ ID NO: 890 - DNA, 21 bp, Artificial sequence
  siRNAs to PCSK9
  modified_base 1..19: /mod_base = "2'-hydroxy corresponding base"
cauucugcccacggacauctt

SEQ ID NO: 891 - DNA, 21 bp, Artificial sequence
  siRNAs to PCSK9
  modified_base 1..19: /mod_base = "2'-hydroxy corresponding base"
guccgugggcagaaugacutt

SEQ ID NO: 892 - DNA, 21 bp, Artificial sequence
  siRNAs to PCSK9
  modified_base 1..19: /mod_base = "2'-hydroxy corresponding base"
agucauucugcccacggactt

SEQ ID NO: 893 - DNA, 21 bp, Artificial sequence
  siRNAs to PCSK9
  modified_base 1..19: /mod_base = "2'-hydroxy corresponding base"
uccgugggcagaaugacuutt

SEQ ID NO: 894 - DNA, 21 bp, Artificial sequence
  siRNAs to PCSK9
  modified_base 1..19: /mod_base = "2'-hydroxy corresponding base"
aagucauucugcccacggatt

SEQ ID NO: 895 - DNA, 21 bp, Artificial sequence
  siRNAs to PCSK9
  modified_base 1..19: /mod_base = "2'-hydroxy corresponding base"
ugggcagaaugacuuuuautt

SEQ ID NO: 896 - DNA, 21 bp, Artificial sequence
  siRNAs to PCSK9
  modified_base 1..19: /mod_base = "2'-hydroxy corresponding base"
auaaaagucauucugcccatt

SEQ ID NO: 897 - DNA, 21 bp, Artificial sequence
  siRNAs to PCSK9
  modified_base 1..19: /mod_base = "2'-hydroxy corresponding base"
acuuuuauugagcucuugutt

SEQ ID NO: 898 - DNA, 21 bp, Artificial sequence
  siRNAs to PCSK9
  modified_base 1..19: /mod_base = "2'-hydroxy corresponding base"
acaagagcucaauaaaagutt

SEQ ID NO: 899 - DNA, 21 bp, Artificial sequence
  siRNAs to PCSK9
  modified_base 1..19: /mod_base = "2'-hydroxy corresponding base"
auugagcucuuguuccgugtt

SEQ ID NO: 900 - DNA, 21 bp, Artificial sequence
  siRNAs to PCSK9
  modified_base 1..19: /mod_base = "2'-hydroxy corresponding base"
cacggaacaagagcucaautt

SEQ ID NO: 901 - DNA, 21 bp, Artificial sequence
  siRNAs to PCSK9
  modified_base 1..19: /mod_base = "2'-hydroxy corresponding base"
agcucuuguuccgugccagtt

SEQ ID NO: 902 - DNA, 21 bp, Artificial sequence
  siRNAs to PCSK9
  modified_base 1..19: /mod_base = "2'-hydroxy corresponding base"
cuggcacggaacaagagcutt

SEQ ID NO: 903 - DNA, 21 bp, Artificial sequence
  siRNAs to PCSK9
  modified_base 1..19: /mod_base = "2'-hydroxy corresponding base"
gcucuuguuccgugccaggtt

SEQ ID NO: 904 - DNA, 21 bp, Artificial sequence
  siRNAs to PCSK9
  modified_base 1..19: /mod_base = "2'-hydroxy corresponding base"
ccuggcacggaacaagagctt

SEQ ID NO: 905 - DNA, 21 bp, Artificial sequence
  siRNAs to PCSK9
  modified_base 1..19: /mod_base = "2'-hydroxy corresponding base"
uguuccgugccaggcauuctt

SEQ ID NO: 906 - DNA, 21 bp, Artificial sequence
  siRNAs to PCSK9
  modified_base 1..19: /mod_base = "2'-hydroxy corresponding base"
gaaugccuggcacggaacatt

SEQ ID NO: 907 - DNA, 21 bp, Artificial sequence
  siRNAs to PCSK9
  modified_base 1..19: /mod_base = "2'-hydroxy corresponding base"
guuccgugccaggcauucatt

SEQ ID NO: 908 - DNA, 21 bp, Artificial sequence
  siRNAs to PCSK9
  modified_base 1..19: /mod_base = "2'-hydroxy corresponding base"
ugaaugccuggcacggaactt

SEQ ID NO: 909 - DNA, 21 bp, Artificial sequence
  siRNAs to PCSK9
  modified_base 1..19: /mod_base = "2'-hydroxy corresponding base"
uuccgugccaggcauucaatt

SEQ ID NO: 910 - DNA, 21 bp, Artificial sequence
  siRNAs to PCSK9
  modified_base 1..19: /mod_base = "2'-hydroxy corresponding base"
uugaaugccuggcacggaatt

SEQ ID NO: 911 - DNA, 21 bp, Artificial sequence
  siRNAs to PCSK9
  modified_base 1..19: /mod_base = "2'-hydroxy corresponding base"
cgugccaggcauucaaucctt

SEQ ID NO: 912 - DNA, 21 bp, Artificial sequence
  siRNAs to PCSK9
  modified_base 1..19: /mod_base = "2'-hydroxy corresponding base"
ggauugaaugccuggcacgtt

SEQ ID NO: 913 - DNA, 21 bp, Artificial sequence
  siRNAs to PCSK9
  modified_base 1..19: /mod_base = "2'-hydroxy corresponding base"
gugccaggcauucaauccutt

SEQ ID NO: 914 - DNA, 21 bp, Artificial sequence
  siRNAs to PCSK9
  modified_base 1..19: /mod_base = "2'-hydroxy corresponding base"
aggauugaaugccuggcactt

SEQ ID NO: 915 - DNA, 21 bp, Artificial sequence
  siRNAs to PCSK9
  modified_base 1..19: /mod_base = "2'-hydroxy corresponding base"
caauccucaggucuccacctt

SEQ ID NO: 916 - DNA, 21 bp, Artificial sequence
  siRNAs to PCSK9
  modified_base 1..19: /mod_base = "2'-hydroxy corresponding base"
gguggagaccugaggauugtt

SEQ ID NO: 917 - DNA, 21 bp, Artificial sequence
  siRNAs to PCSK9
  modified_base 21: /mod_base = "5'-thio thymidine"
  modified_base 1..19: /mod_base = "2'-hydroxy corresponding base"
caccaaggaggcaggauuctt

SEQ ID NO: 918 - DNA, 21 bp, Artificial sequence
  siRNAs to PCSK9
  modified_base 21: /mod_base = "5'-thio thymidine"
  modified_base 1..19: /mod_base = "2'-hydroxy corresponding base"
gaauccugccuccuuggugtt

SEQ ID NO: 919 - DNA, 21 bp, Artificial sequence
  siRNAs to PCSK9
  modified_base 1, 3, 4, 12, 17, 18, 19: /mod_base = "2'-O-methyl corresponding base"
  modified_base 21: /mod_base = "5'-thio thymidine"
  modified_base 2, 5, 6, 7, 8, 9, 10, 11, 13, 14, 15, 16: /mod_base = "2'-hydroxy corresponding base"
caccaaggaggcaggauuctt

SEQ ID NO: 920 - DNA, 21 bp, Artificial sequence
  siRNAs to PCSK9
  modified_base 21: /mod_base = "5'-thio thymidine"
  modified_base 1..19: /mod_base = "2'-hydroxy corresponding base"
gaauccugccuccuuggugtt

SEQ ID NO: 921 - DNA, 21 bp, Artificial sequence
  siRNAs to PCSK9
  modified_base 2, 4, 6, 8, 10, 12, 14, 16, 18: /mod_base = "2'-O-methyl corresponding base"
  modified_base 1, 3, 5, 7, 9, 11, 13, 15, 17, 19: /mod_base = "2'-deoxy-2'-fluoro corresponding base"
  modified_base 21: /mod_base = "5'-thio thymidine"
caccaaggaggcaggauuctt

SEQ ID NO: 922 - DNA, 21 bp, Artificial sequence
  siRNAs to PCSK9
  modified_base 1, 3, 5, 7, 9, 11, 13, 15, 17, 19: /mod_base = "2'-O-methyl corresponding base"
  modified_base 2, 4, 6, 8, 10, 12, 14, 16, 18: /mod_base = "2'-deoxy-2'-fluoro corresponding base"
  modified_base 21: /mod_base = "5'-thio thymidine"
gaauccugccuccuuggugtt

SEQ ID NO: 923 - DNA, 21 bp, Artificial sequence
  siRNAs to PCSK9
  modified_base 1, 3, 4, 12, 17, 18, 19: /mod_base = "2'-deoxy-2'-fluoro corresponding base"
  modified_base 21: /mod_base = "5'-thio thymidine"
  modified_base 2, 5, 6, 7, 8, 9, 10, 11, 13, 14, 15, 16: /mod_base = "2'-hydroxy corresponding base"
caccaaggaggcaggauuctt

SEQ ID NO: 924 - DNA, 21 bp, Artificial sequence
  siRNAs to PCSK9
  modified_base 4, 5, 6, 7, 9, 10, 11, 12, 13, 14, 15, 18: /mod_base = "2'-deoxy-2'-fluoro corresponding base"
  modified_base 21: /mod_base = "5'-thio thymidine"
  modified_base 1, 2, 3, 8, 16, 17, 19: /mod_base = "2'-hydroxy corresponding base"
gaauccugccuccuuggugtt

SEQ ID NO: 925 - DNA, 21 bp, Artificial sequence
  siRNAs to PCSK9
  modified_base 2, 4, 6, 8, 10, 12, 14, 16, 18: /mod_base = "2'-O-methyl corresponding base"
  modified_base 21: /mod_base = "5'-thio thymidine"
  modified_base 1, 3, 5, 7, 9, 11, 13, 15, 17, 19: /mod_base = "2'-hydroxy corresponding base"
caccaaggaggcaggauuctt

SEQ ID NO: 926 - DNA, 21 bp, Artificial sequence
  siRNAs to PCSK9
  modified_base 1, 3, 5, 7, 9, 11, 13, 15, 17, 19: /mod_base = "2'-O-methyl corresponding base"
  modified_base 2, 4, 6, 8, 10, 12, 14, 16, 18: /mod_base = "2'-deoxy-2'-fluoro corresponding base"
  modified_base 21: /mod_base = "5'-thio thymidine"
gaauccugccuccuuggugtt

SEQ ID NO: 927 - DNA, 21 bp, Artificial sequence
  siRNAs to PCSK9
  modified_base 2, 4, 6, 8, 10, 12, 14, 16, 18: /mod_base = "2'-O-methyl corresponding base"
  modified_base 21: /mod_base = "5'-thio thymidine"
  modified_base 1, 3, 5, 7, 9, 11, 13, 15, 17, 19: /mod_base = "2'-hydroxy corresponding base"
caccaaggaggcaggauuctt

SEQ ID NO: 928 - DNA, 21 bp, Artificial sequence
  siRNAs to PCSK9
  modified_base 4, 5, 6, 7, 9, 10, 11, 12, 13, 14, 15, 18: /mod_base = "2'-deoxy-2'-fluoro corresponding base"
  modified_base 21: /mod_base = "5'-thio thymidine"
  modified_base 1, 2, 3, 8, 16, 17, 19: /mod_base = "2'-hydroxy corresponding base"
gaauccugccuccuuggugtt

SEQ ID NO: 929 - DNA, 21 bp, Artificial sequence
  siRNAs to PCSK9
  modified_base 2, 4, 6, 8, 10, 12, 14, 16, 18: /mod_base = "2'-O-methyl corresponding base"
  modified_base 1, 3, 5, 7, 9, 11, 13, 15, 17, 19: /mod_base = "2'-deoxy-2'-fluoro corresponding base"
  modified_base 21: /mod_base = "5'-thio thymidine"
caccaaggaggcaggauuctt

SEQ ID NO: 930 - DNA, 21 bp, Artificial sequence
  siRNAs to PCSK9
  modified_base 6, 7, 10, 11, 17, 18, 19: /mod_base = "2'-O-methyl corresponding base"
  modified_base 21: /mod_base = "5'-thio thymidine"
  modified_base 1, 2, 3, 4, 5, 8, 9, 12, 13, 14, 15, 16: /mod_base = "2'-hydroxy corresponding base"
gaauccugccuccuuggugtt

SEQ ID NO: 931 - DNA, 21 bp, Artificial sequence
  siRNAs to PCSK9
  modified_base 1, 3, 4, 12, 17, 18, 19: /mod_base = "2'-deoxy-2'-fluoro corresponding base"
  modified_base 21: /mod_base = "5'-thio thymidine"
  modified_base 2, 5, 6, 7, 8, 9, 10, 11, 13, 14, 15, 16: /mod_base = "2'-hydroxy corresponding base"
caccaaggaggcaggauuctt

SEQ ID NO: 932 - DNA, 21 bp, Artificial sequence
  siRNAs to PCSK9
  modified_base 6, 7, 10, 11, 17, 18, 19: /mod_base = "2'-O-methyl corresponding base"
  modified_base 21: /mod_base = "5'-thio thymidine"
  modified_base 1, 2, 3, 4, 5, 8, 9, 12, 13, 14, 15, 16: /mod_base = "2'-hydroxy corresponding base"
gaauccugccuccuuggugtt

SEQ ID NO: 933 - DNA, 21 bp, Artificial sequence
  siRNAs to PCSK9
  modified_base 2, 4, 6, 8, 10, 12, 14, 16, 18: /mod_base = "2'-O-methyl corresponding base"
  modified_base 21: /mod_base = "5'-thio thymidine"
  modified_base 1, 3, 5, 7, 9, 11, 13, 15, 17, 19: /mod_base = "2'-hydroxy corresponding base"
caccaaggaggcaggauuctt

SEQ ID NO: 934 - DNA, 21 bp, Artificial sequence
  siRNAs to PCSK9
  modified_base 6, 7, 10, 11, 17, 18, 19: /mod_base = "2'-O-methyl corresponding base"
  modified_base 21: /mod_base = "5'-thio thymidine"
  modified_base 1, 2, 3, 4, 5, 8, 9, 12, 13, 14, 15, 16: /mod_base = "2'-hydroxy corresponding base"
gaauccugccuccuuggugtt

SEQ ID NO: 935 - DNA, 21 bp, Artificial sequence
  siRNAs to PCSK9
  modified_base 2, 4, 6, 8, 10, 12, 14, 16, 18: /mod_base = "2'-O-methyl corresponding base"
  modified_base 1, 3, 5, 7, 9, 11, 13, 15, 17, 19: /mod_base = "2'-deoxy-2'-fluoro corresponding base"
  modified_base 21: /mod_base = "5'-thio thymidine"
ggccuggaguuuauucggatt

SEQ ID NO: 936 - DNA, 21 bp, Artificial sequence
  siRNAs to PCSK9
  modified_base 1, 3, 5, 7, 9, 11, 13, 15, 17, 19: /mod_base = "2'-O-methyl corresponding base"
  modified_base 2, 4, 6, 8, 10, 12, 14, 16, 18: /mod_base = "2'-deoxy-2'-fluoro corresponding base"
  modified_base 21: /mod_base = "5'-thio thymidine"
uccgaauaaacuccaggcctt

SEQ ID NO: 937 - DNA, 21 bp, Artificial sequence
  siRNAs to PCSK9
  modified_base 3, 4, 5, 10, 11, 12, 14, 15, 16: /mod_base = "2'-deoxy-2'-fluoro corresponding base"
  modified_base 21: /mod_base = "5'-thio thymidine"
  modified_base 1, 2, 6, 7, 8, 9, 13, 17, 18, 19: /mod_base = "2'-hydroxy corresponding base"
ggccuggaguuuauucggatt

SEQ ID NO: 938 - DNA, 21 bp, Artificial sequence
  siRNAs to PCSK9
  modified_base 1, 2, 3, 7, 11, 12, 13, 14, 18, 19: /mod_base = "2'-deoxy-2'-fluoro corresponding base"
  modified_base 21: /mod_base = "5'-thio thymidine"
  modified_base 4, 5, 6, 8, 9, 10, 15, 16, 17: /mod_base = "2'-hydroxy corresponding base"
uccgaauaaacuccaggcctt

SEQ ID NO: 939 - DNA, 21 bp, Artificial sequence
  siRNAs to PCSK9
  modified_base 2, 4, 6, 8, 10, 12, 14, 16, 18: /mod_base = "2'-O-methyl corresponding base"
  modified_base 21: /mod_base = "5'-thio thymidine"
  modified_base 1, 3, 5, 7, 9, 11, 13, 15, 17, 19: /mod_base = "2'-hydroxy corresponding base"
ggccuggaguuuauucggatt

SEQ ID NO: 940 - DNA, 21 bp, Artificial sequence
  siRNAs to PCSK9
  modified_base 1, 3, 5, 7, 9, 11, 13, 15, 17, 19: /mod_base = "2'-O-methyl corresponding base"
  modified_base 2, 4, 6, 8, 10, 12, 14, 16, 18: /mod_base = "2'-deoxy-2'-fluoro corresponding base"
  modified_base 21: /mod_base = "5'-thio thymidine"
uccgaauaaacuccaggcctt

SEQ ID NO: 941 - DNA, 21 bp, Artificial sequence
  siRNAs to PCSK9
  modified_base 2, 4, 6, 8, 10, 12, 14, 16, 18: /mod_base = "2'-O-methyl corresponding base"
  modified_base 21: /mod_base = "5'-thio thymidine"
  modified_base 1, 3, 5, 7, 9, 11, 13, 15, 17, 19: /mod_base = "2'-hydroxy corresponding base"
ggccuggaguuuauucggatt

SEQ ID NO: 942 - DNA, 21 bp, Artificial sequence
  siRNAs to PCSK9
  modified_base 1, 2, 3, 7, 11, 12, 13, 14, 18, 19: /mod_base = "2'-deoxy-2'-fluoro corresponding base"
  modified_base 21: /mod_base = "5'-thio thymidine"
  modified_base 4, 5, 6, 8, 9, 10, 15, 16, 17: /mod_base = "2'-hydroxy corresponding base"
uccgaauaaacuccaggcctt

SEQ ID NO: 943 - DNA, 21 bp, Artificial sequence
  siRNAs to PCSK9
  modified_base 2, 4, 6, 8, 10, 12, 14, 16, 18: /mod_base = "2'-O-methyl corresponding base"
  modified_base 1, 3, 5, 7, 9, 11, 13, 15, 17, 19: /mod_base = "2'-deoxy-2'-fluoro corresponding base"
  modified_base 21: /mod_base = "5'-thio thymidine"
ggccuggaguuuauucggatt

SEQ ID NO: 944 - DNA, 21 bp, Artificial sequence
  siRNAs to PCSK9
  modified_base 6, 7, 10, 11, 17, 18, 19: /mod_base = "2'-O-methyl corresponding base"
  modified_base 21: /mod_base = "5'-thio thymidine"
  modified_base 1, 2, 3, 4, 5, 8, 9, 12, 13, 14, 15, 16: /mod_base = "2'-hydroxy corresponding base"
uccgaauaaacuccaggcctt

SEQ ID NO: 945 - DNA, 21 bp, Artificial sequence
  siRNAs to PCSK9
  modified_base 3, 4, 5, 10, 11, 12, 14, 15, 16: /mod_base = "2'-deoxy-2'-fluoro corresponding base"
  modified_base 21: /mod_base = "5'-thio thymidine"
  modified_base 1, 2, 6, 7, 8, 9, 13, 17, 18, 19: /mod_base = "2'-hydroxy corresponding base"
ggccuggaguuuauucggatt

SEQ ID NO: 946 - DNA, 21 bp, Artificial sequence
  siRNAs to PCSK9
  modified_base 6, 7, 10, 11, 17, 18, 19: /mod_base = "2'-O-methyl corresponding base"
  modified_base 21: /mod_base = "5'-thio thymidine"
  modified_base 1, 2, 3, 4, 5, 8, 9, 12, 13, 14, 15, 16: /mod_base = "2'-hydroxy corresponding base"
uccgaauaaacuccaggcctt

SEQ ID NO: 947 - DNA, 21 bp, Artificial sequence
  siRNAs to PCSK9
  modified_base 2, 4, 6, 8, 10, 12, 14, 16, 18: /mod_base = "2'-O-methyl corresponding base"
  modified_base 21: /mod_base = "5'-thio thymidine"
  modified_base 1, 3, 5, 7, 9, 11, 13, 15, 17, 19: /mod_base = "2'-hydroxy corresponding base"
ggccuggaguuuauucggatt

SEQ ID NO: 948 - DNA, 21 bp, Artificial sequence
  siRNAs to PCSK9
  modified_base 6, 7, 10, 11, 17, 18, 19: /mod_base = "2'-O-methyl corresponding base"
  modified_base 21: /mod_base = "5'-thio thymidine"
  modified_base 1, 2, 3, 4, 5, 8, 9, 12, 13, 14, 15, 16: /mod_base = "2'-hydroxy corresponding base"
uccgaauaaacuccaggcctt

SEQ ID NO: 949 - DNA, 21 bp, Artificial sequence
  siRNAs to PCSK9
  modified_base 1..19: /mod_base = "2'-hydroxy corresponding base"
gcaggauucuucccauggatt

SEQ ID NO: 950 - DNA, 21 bp, Artificial sequence
  siRNAs to PCSK9
  modified_base 1..19: /mod_base = "2'-hydroxy corresponding base"
uccaugggaagaauccugctt

SEQ ID NO: 951 - DNA, 21 bp, Artificial sequence
  siRNAs to PCSK9
  modified_base 1..19: /mod_base = "2'-hydroxy corresponding base"
ugcagggacaaacaucguutt

SEQ ID NO: 952 - DNA, 21 bp, Artificial sequence
  siRNAs to PCSK9
  modified_base 1..19: /mod_base = "2'-hydroxy corresponding base"
aacgauguuugucccugcatt

SEQ ID NO: 953 - DNA, 21 bp, Artificial sequence
  siRNAs to PCSK9
  modified_base 1..19: /mod_base = "2'-hydroxy corresponding base"
gcagggacaaacaucguugtt

SEQ ID NO: 954 - DNA, 21 bp, Artificial sequence
  siRNAs to PCSK9
  modified_base 1..19: /mod_base = "2'-hydroxy corresponding base"
caacgauguuugucccugctt

SEQ ID NO: 955 - DNA, 21 bp, Artificial sequence
  siRNAs to PCSK9
  modified_base 1..19: /mod_base = "2'-hydroxy corresponding base"
agggacaaacaucguugggtt

SEQ ID NO: 956 - DNA, 21 bp, Artificial sequence
  siRNAs to PCSK9
  modified_base 1..19: /mod_base = "2'-hydroxy corresponding base"
cccaacgauguuugucccutt

SEQ ID NO: 957 - DNA, 21 bp, Artificial sequence
  siRNAs to PCSK9
  modified_base 1..19: /mod_base = "2'-hydroxy corresponding base"
cccucaucuccagcuaacutt

SEQ ID NO: 958 - DNA, 21 bp, Artificial sequence
  siRNAs to PCSK9
  modified_base 1..19: /mod_base = "2'-hydroxy corresponding base"
aguuagcuggagaugagggtt

SEQ ID NO: 959 - DNA, 21 bp, Artificial sequence
  siRNAs to PCSK9
  modified_base 1..19: /mod_base = "2'-hydroxy corresponding base"
caucuccagcuaacuguggtt

SEQ ID NO: 960 - DNA, 21 bp, Artificial sequence
  siRNAs to PCSK9
  modified_base 1..19: /mod_base = "2'-hydroxy corresponding base"
ccacaguuagcuggagaugtt

SEQ ID NO: 961 - DNA, 21 bp, Artificial sequence
  siRNAs to PCSK9
  modified_base 1..19: /mod_base = "2'-hydroxy corresponding base"
gcucccugauuaauggaggtt

SEQ ID NO: 962 - DNA, 21 bp, Artificial sequence
  siRNAs to PCSK9
  modified_base 1..19: /mod_base = "2'-hydroxy corresponding base"
ccuccauuaaucagggagctt

SEQ ID NO: 963 - DNA, 21 bp, Artificial sequence
  siRNAs to PCSK9
  modified_base 1..19: /mod_base = "2'-hydroxy corresponding base"
cccugauuaauggaggcuutt

SEQ ID NO: 964 - DNA, 21 bp, Artificial sequence
  siRNAs to PCSK9
  modified_base 1..19: /mod_base = "2'-hydroxy corresponding base"
aagccuccauuaaucagggtt

SEQ ID NO: 965 - DNA, 21 bp, Artificial sequence
  siRNAs to PCSK9
  modified_base 1..19: /mod_base = "2'-hydroxy corresponding base"
ccugauuaauggaggcuuatt

SEQ ID NO: 966 - DNA, 21 bp, Artificial sequence
  siRNAs to PCSK9
  modified_base 1..19: /mod_base = "2'-hydroxy corresponding base"
uaagccuccauuaaucaggtt

SEQ ID NO: 967 - DNA, 21 bp, Artificial sequence
  siRNAs to PCSK9
  modified_base 1..19: /mod_base = "2'-hydroxy corresponding base"
ugauuaauggaggcuuagctt

SEQ ID NO: 968 - DNA, 21 bp, Artificial sequence
  siRNAs to PCSK9
  modified_base 1..19: /mod_base = "2'-hydroxy corresponding base"
gcuaagccuccauuaaucatt

SEQ ID NO: 969 - DNA, 21 bp, Artificial sequence
  siRNAs to PCSK9
  modified_base 1..19: /mod_base = "2'-hydroxy corresponding base"
gauuaauggaggcuuagcutt

SEQ ID NO: 970 - DNA, 21 bp, Artificial sequence
  siRNAs to PCSK9
  modified_base 1..19: /mod_base = "2'-hydroxy corresponding base"
agcuaagccuccauuaauctt

SEQ ID NO: 971 - DNA, 21 bp, Artificial sequence
  siRNAs to PCSK9
  modified_base 1..19: /mod_base = "2'-hydroxy corresponding base"
auuaauggaggcuuagcuutt

SEQ ID NO: 972 - DNA, 21 bp, Artificial sequence
  siRNAs to PCSK9
  modified_base 1..19: /mod_base = "2'-hydroxy corresponding base"
aagcuaagccuccauuaautt

SEQ ID NO: 973 - DNA, 21 bp, Artificial sequence
  siRNAs to PCSK9
  modified_base 1..19: /mod_base = "2'-hydroxy corresponding base"
uuaauggaggcuuagcuuutt

SEQ ID NO: 974 - DNA, 21 bp, Artificial sequence
  siRNAs to PCSK9
  modified_base 1..19: /mod_base = "2'-hydroxy corresponding base"
aaagcuaagccuccauuaatt

SEQ ID NO: 975 - DNA, 21 bp, Artificial sequence
  siRNAs to PCSK9
  modified_base 21: /mod_base = "5'-thio thymidine"
  modified_base 1..19: /mod_base = "2'-hydroxy corresponding base"
uuucuggauggcaucuagctt

SEQ ID NO: 976 - DNA, 21 bp, Artificial sequence
  siRNAs to PCSK9
  modified_base 21: /mod_base = "5'-thio thymidine"
  modified_base 1..19: /mod_base = "2'-hydroxy corresponding base"
gcuagaugccauccagaaatt

SEQ ID NO: 977 - DNA, 21 bp, Artificial sequence
  siRNAs to PCSK9
  modified_base 1, 2, 3, 4, 5, 9, 12, 14, 15, 16, 19: /mod_base = "2'-O-methyl corresponding base"
  modified_base 21: /mod_base = "5'-thio thymidine"
  modified_base 6, 7, 8, 10, 11, 13, 17, 18: /mod_base = "2'-hydroxy corresponding base"
uuucuggauggcaucuagctt

SEQ ID NO: 978 - DNA, 21 bp, Artificial sequence
  siRNAs to PCSK9
  modified_base 3, 10, 14: /mod_base = "2'-O-methyl corresponding base"
  modified_base 21: /mod_base = "5'-thio thymidine"
  modified_base 1, 2, 4, 5, 6, 7, 8, 9, 11, 12, 13, 15, 16, 17, 18, 19: /mod_base = "2'-hydroxy corresponding base"
gcuagaugccauccagaaatt

SEQ ID NO: 979 - DNA, 21 bp, Artificial sequence
  siRNAs to PCSK9
  modified_base 21: /mod_base = "5'-thio thymidine"
  modified_base 1..19: /mod_base = "2'-hydroxy corresponding base"
uucuggauggcaucuagcctt

SEQ ID NO: 980 - DNA, 21 bp, Artificial sequence
  siRNAs to PCSK9
  modified_base 21: /mod_base = "5'-thio thymidine"
  modified_base 1..19: /mod_base = "2'-hydroxy corresponding base"
ggcuagaugccauccagaatt

SEQ ID NO: 981 - DNA, 21 bp, Artificial sequence
  siRNAs to PCSK9
  modified_base 1, 2, 3, 4, 8, 11, 13, 14, 15, 18, 19: /mod_base = "2'-O-methyl corresponding base"
  modified_base 21: /mod_base = "5'-thio thymidine"
  modified_base 5, 6, 7, 9, 10, 12, 16, 17: /mod_base = "2'-hydroxy corresponding base"
uucuggauggcaucuagcctt

SEQ ID NO: 982 - DNA, 21 bp, Artificial sequence
  siRNAs to PCSK9
  modified_base 4, 11, 15: /mod_base = "2'-O-methyl corresponding base"
  modified_base 21: /mod_base = "5'-thio thymidine"
  modified_base 1, 2, 3, 5, 6, 7, 8, 9, 10, 12, 13, 14, 16, 17, 18, 19: /mod_base = "2'-hydroxy corresponding base"
ggcuagaugccauccagaatt

SEQ ID NO: 983 - DNA, 21 bp, Artificial sequence
  siRNAs to PCSK9
  modified_base 21: /mod_base = "5'-thio thymidine"
  modified_base 1..19: /mod_base = "2'-hydroxy corresponding base"
ucuggauggcaucuagccatt

SEQ ID NO: 984 - DNA, 21 bp, Artificial sequence
  siRNAs to PCSK9
  modified_base 21: /mod_base = "5'-thio thymidine"
  modified_base 1..19: /mod_base = "2'-hydroxy corresponding base"
uggcuagaugccauccagatt

SEQ ID NO: 985 - DNA, 21 bp, Artificial sequence
  siRNAs to PCSK9
  modified_base 1, 2, 3, 7, 10, 12, 13, 14, 17, 18: /mod_base = "2'-O-methyl corresponding base"
  modified_base 21: /mod_base = "5'-thio thymidine"
  modified_base 4, 5, 6, 8, 9, 11, 15, 16, 19: /mod_base = "2'-hydroxy corresponding base"
ucuggauggcaucuagccatt

SEQ ID NO: 986 - DNA, 21 bp, Artificial sequence
  siRNAs to PCSK9
  modified_base 5, 12, 16: /mod_base = "2'-O-methyl corresponding base"
  modified_base 21: /mod_base = "5'-thio thymidine"
  modified_base 1, 2, 3, 4, 6, 7, 8, 9, 10, 11, 13, 14, 15, 17, 18, 19: /mod_base = "2'-hydroxy corresponding base"
uggcuagaugccauccagatt

SEQ ID NO: 987 - DNA, 21 bp, Artificial sequence
  siRNAs to PCSK9
  modified_base 1..19: /mod_base = "2'-hydroxy corresponding base"
aggcuggagacaggugcgctt

SEQ ID NO: 988 - DNA, 21 bp, Artificial sequence
  siRNAs to PCSK9
  modified_base 1..19: /mod_base = "2'-hydroxy corresponding base"
gcgcaccugucuccagccutt

SEQ ID NO: 989 - DNA, 21 bp, Artificial sequence
  siRNAs to PCSK9
  modified_base 1..19: /mod_base = "2'-hydroxy corresponding base"
ggcuggagacaggugcgcctt

SEQ ID NO: 990 - DNA, 21 bp, Artificial sequence
  siRNAs to PCSK9
  modified_base 1..19: /mod_base = "2'-hydroxy corresponding base"
ggcgcaccugucuccagcctt

SEQ ID NO: 991 - DNA, 21 bp, Artificial sequence
  siRNAs to PCSK9
  modified_base 1..19: /mod_base = "2'-hydroxy corresponding base"
gcuggagacaggugcgccctt

SEQ ID NO: 992 - DNA, 21 bp, Artificial sequence
  siRNAs to PCSK9
  modified_base 1..19: /mod_base = "2'-hydroxy corresponding base"
gggcgcaccugucuccagctt

SEQ ID NO: 993 - DNA, 21 bp, Artificial sequence
  siRNAs to PCSK9
  modified_base 1..19: /mod_base = "2'-hydroxy corresponding base"
uuccugagccaccuuuacutt

SEQ ID NO: 994 - DNA, 21 bp, Artificial sequence
  siRNAs to PCSK9
  modified_base 1..19: /mod_base = "2'-hydroxy corresponding base"
aguaaagguggcucaggaatt

SEQ ID NO: 995 - DNA, 21 bp, Artificial sequence
  siRNAs to PCSK9
  modified_base 1..19: /mod_base = "2'-hydroxy corresponding base"
uccugagccaccuuuacuctt

SEQ ID NO: 996 - DNA, 21 bp, Artificial sequence
  siRNAs to PCSK9
  modified_base 1..19: /mod_base = "2'-hydroxy corresponding base"
gaguaaagguggcucaggatt

SEQ ID NO: 997 - DNA, 21 bp, Artificial sequence
  siRNAs to PCSK9
  modified_base 1..19: /mod_base = "2'-hydroxy corresponding base"
ccugagccaccuuuacucutt

SEQ ID NO: 998 - DNA, 21 bp, Artificial sequence
  siRNAs to PCSK9
  modified_base 1..19: /mod_base = "2'-hydroxy corresponding base"
agaguaaagguggcucaggtt

SEQ ID NO: 999 - DNA, 21 bp, Artificial sequence
  siRNAs to PCSK9
  modified_base 1..19: /mod_base = "2'-hydroxy corresponding base"
ugagccaccuuuacucugctt

SEQ ID NO: 1000 - DNA, 21 bp, Artificial sequence
  siRNAs to PCSK9
  modified_base 1..19: /mod_base = "2'-hydroxy corresponding base"
gcagaguaaagguggcucatt

SEQ ID NO: 1001 - DNA, 21 bp, Artificial sequence
  siRNAs to PCSK9
  modified_base 1..19: /mod_base = "2'-hydroxy corresponding base"
agccaccuuuacucugcuctt

SEQ ID NO: 1002 - DNA, 21 bp, Artificial sequence
  siRNAs to PCSK9
  modified_base 1..19: /mod_base = "2'-hydroxy corresponding base"
gagcagaguaaagguggcutt

SEQ ID NO: 1003 - DNA, 21 bp, Artificial sequence
  siRNAs to PCSK9
  modified_base 1..19: /mod_base = "2'-hydroxy corresponding base"
caccuuuacucugcucuautt

SEQ ID NO: 1004 - DNA, 21 bp, Artificial sequence
  siRNAs to PCSK9
  modified_base 1..19: /mod_base = "2'-hydroxy corresponding base"
auagagcagaguaaaggugtt

SEQ ID NO: 1005 - DNA, 21 bp, Artificial sequence
  siRNAs to PCSK9
  modified_base 21: /mod_base = "5'-thio thymidine"
  modified_base 1..19: /mod_base = "2'-hydroxy corresponding base"
uacucugcucuaugccaggtt

SEQ ID NO: 1006 - DNA, 21 bp, Artificial sequence
  siRNAs to PCSK9
  modified_base 21: /mod_base = "5'-thio thymidine"
  modified_base 1..19: /mod_base = "2'-hydroxy corresponding base"
ccuggcauagagcagaguatt

SEQ ID NO: 1007 - DNA, 21 bp, Artificial sequence
  siRNAs to PCSK9
  modified_base 1, 3, 4, 5, 6, 8, 9, 10, 11, 13, 15, 16: /mod_base = "2'-O-methyl corresponding base"
  modified_base 21: /mod_base = "5'-thio thymidine"
  modified_base 2, 7, 12, 14, 17, 18, 19: /mod_base = "2'-hydroxy corresponding base"
uacucugcucuaugccaggtt

SEQ ID NO: 1008 - DNA, 21 bp, Artificial sequence
  siRNAs to PCSK9
  modified_base 6, 8, 13, 18: /mod_base = "2'-O-methyl corresponding base"
  modified_base 21: /mod_base = "5'-thio thymidine"
  modified_base 1, 2, 3, 4, 5, 7, 9, 10, 11, 12, 14, 15, 16, 17, 19: /mod_base = "2'-hydroxy corresponding base"
ccuggcauagagcagaguatt

SEQ ID NO: 1009 - DNA, 21 bp, Artificial sequence
  siRNAs to PCSK9
  modified_base 1..19: /mod_base = "2'-hydroxy corresponding base"
augccaggcugugcuagcatt

SEQ ID NO: 1010 - DNA, 21 bp, Artificial sequence
  siRNAs to PCSK9
  modified_base 1..19: /mod_base = "2'-hydroxy corresponding base"
ugcuagcacagccuggcautt

SEQ ID NO: 1011 - DNA, 21 bp, Artificial sequence
  siRNAs to PCSK9
  modified_base 1..19: /mod_base = "2'-hydroxy corresponding base"
aggcugugcuagcaacacctt

SEQ ID NO: 1012 - DNA, 21 bp, Artificial sequence
  siRNAs to PCSK9
  modified_base 1..19: /mod_base = "2'-hydroxy corresponding base"
gguguugcuagcacagccutt

SEQ ID NO: 1013 - DNA, 21 bp, Artificial sequence
  siRNAs to PCSK9
  modified_base 1..19: /mod_base = "2'-hydroxy corresponding base"
cugugcuagcaacacccaatt

SEQ ID NO: 1014 - DNA, 21 bp, Artificial sequence
  siRNAs to PCSK9
  modified_base 1..19: /mod_base = "2'-hydroxy corresponding base"
uuggguguugcuagcacagtt

SEQ ID NO: 1015 - DNA, 21 bp, Artificial sequence
  siRNAs to PCSK9
  modified_base 1..19: /mod_base = "2'-hydroxy corresponding base"
gcuagcaacacccaaaggutt

SEQ ID NO: 1016 - DNA, 21 bp, Artificial sequence
  siRNAs to PCSK9
  modified_base 1..19: /mod_base = "2'-hydroxy corresponding base"
accuuuggguguugcuagctt

SEQ ID NO: 1017 - DNA, 21 bp, Artificial sequence
  siRNAs to PCSK9
  modified_base 1..19: /mod_base = "2'-hydroxy corresponding base"
ggagccaucaccuaggacutt

SEQ ID NO: 1018 - DNA, 21 bp, Artificial sequence
  siRNAs to PCSK9
  modified_base 1..19: /mod_base = "2'-hydroxy corresponding base"
aguccuaggugauggcucctt

SEQ ID NO: 1019 - DNA, 21 bp, Artificial sequence
  siRNAs to PCSK9
  modified_base 1..19: /mod_base = "2'-hydroxy corresponding base"
caccuaggacugacucggctt

SEQ ID NO: 1020 - DNA, 21 bp, Artificial sequence
  siRNAs to PCSK9
  modified_base 1..19: /mod_base = "2'-hydroxy corresponding base"
gccgagucaguccuaggugtt

SEQ ID NO: 1021 - DNA, 21 bp, Artificial sequence
  siRNAs to PCSK9
  modified_base 1..19: /mod_base = "2'-hydroxy corresponding base"
aggacugacucggcagugutt

SEQ ID NO: 1022 - DNA, 21 bp, Artificial sequence
  siRNAs to PCSK9
  modified_base 1..19: /mod_base = "2'-hydroxy corresponding base"
acacugccgagucaguccutt

SEQ ID NO: 1023 - DNA, 21 bp, Artificial sequence
  siRNAs to PCSK9
  modified_base 1..19: /mod_base = "2'-hydroxy corresponding base"
ggacugacucggcagugugtt

SEQ ID NO: 1024 - DNA, 21 bp, Artificial sequence
  siRNAs to PCSK9
  modified_base 1..19: /mod_base = "2'-hydroxy corresponding base"
cacacugccgagucagucctt

SEQ ID NO: 1025 - DNA, 21 bp, Artificial sequence
  siRNAs to PCSK9
  modified_base 1..19: /mod_base = "2'-hydroxy corresponding base"
uggugcaugcacugucucatt

SEQ ID NO: 1026 - DNA, 21 bp, Artificial sequence
  siRNAs to PCSK9
  modified_base 1..19: /mod_base = "2'-hydroxy corresponding base"
ugagacagugcaugcaccatt

SEQ ID NO: 1027 - DNA, 21 bp, Artificial sequence
  siRNAs to PCSK9
  modified_base 1..19: /mod_base = "2'-hydroxy corresponding base"
augcacugucucagccaactt

SEQ ID NO: 1028 - DNA, 21 bp, Artificial sequence
  siRNAs to PCSK9
  modified_base 1..19: /mod_base = "2'-hydroxy corresponding base"
guuggcugagacagugcautt

SEQ ID NO: 1029 - DNA, 21 bp, Artificial sequence
  siRNAs to PCSK9
  modified_base 1..19: /mod_base = "2'-hydroxy corresponding base"
cugucucagccaacccgcutt

SEQ ID NO: 1030 - DNA, 21 bp, Artificial sequence
  siRNAs to PCSK9
  modified_base 1..19: /mod_base = "2'-hydroxy corresponding base"
agcggguuggcugagacagtt

SEQ ID NO: 1031 - DNA, 21 bp, Artificial sequence
  siRNAs to PCSK9
  modified_base 21: /mod_base = "5'-thio thymidine"
  modified_base 1..19: /mod_base = "2'-hydroxy corresponding base"
cucagccaacccgcuccactt

SEQ ID NO: 1032 - DNA, 21 bp, Artificial sequence
  siRNAs to PCSK9
  modified_base 21: /mod_base = "5'-thio thymidine"
  modified_base 1..19: /mod_base = "2'-hydroxy corresponding base"
guggagcggguuggcugagtt

SEQ ID NO: 1033 - DNA, 21 bp, Artificial sequence
  siRNAs to PCSK9
  modified_base 1, 2, 3, 6, 7, 10, 11, 12, 14, 15, 16, 17, 19: /mod_base = "2'-O-methyl corresponding base"
  modified_base 21: /mod_base = "5'-thio thymidine"
  modified_base 4, 5, 8, 9, 13, 18: /mod_base = "2'-hydroxy corresponding base"
cucagccaacccgcuccactt

SEQ ID NO: 1034 - DNA, 21 bp, Artificial sequence
  siRNAs to PCSK9
  modified_base 21: /mod_base = "5'-thio thymidine"
  modified_base 1..19: /mod_base = "2'-hydroxy corresponding base"
guggagcggguuggcugagtt

SEQ ID NO: 1035 - DNA, 21 bp, Artificial sequence
  siRNAs to PCSK9
  modified_base 21: /mod_base = "5'-thio thymidine"
  modified_base 1..19: /mod_base = "2'-hydroxy corresponding base"
gccaacccgcuccacuacctt

SEQ ID NO: 1036 - DNA, 21 bp, Artificial sequence
  siRNAs to PCSK9
  modified_base 21: /mod_base = "5'-thio thymidine"
  modified_base 1..19: /mod_base = "2'-hydroxy corresponding base"
gguaguggagcggguuggctt

SEQ ID NO: 1037 - DNA, 21 bp, Artificial sequence
  siRNAs to PCSK9
  modified_base 2, 3, 6, 7, 8, 10, 11, 12, 13, 15, 16, 18, 19: /mod_base = "2'-O-methyl corresponding base"
  modified_base 21: /mod_base = "5'-thio thymidine"
  modified_base 1, 4, 5, 9, 14, 17: /mod_base = "2'-hydroxy corresponding base"
gccaacccgcuccacuacctt

SEQ ID NO: 1038 - DNA, 21 bp, Artificial sequence
  siRNAs to PCSK9
  modified_base 3: /mod_base = "2'-O-methyl corresponding base"
  modified_base 21: /mod_base = "5'-thio thymidine"
  modified_base 1, 2, 4, 5, 6, 7, 8, 9, 10, 11, 12, 13, 14, 15, 16, 17, 18, 19: /mod_base = "2'-hydroxy corresponding base"
gguaguggagcggguuggctt

SEQ ID NO: 1039 - DNA, 21 bp, Artificial sequence
  siRNAs to PCSK9
  modified_base 1..19: /mod_base = "2'-hydroxy corresponding base"
aacccgcuccacuacccggtt

SEQ ID NO: 1040 - DNA, 21 bp, Artificial sequence
  siRNAs to PCSK9
  modified_base 1..19: /mod_base = "2'-hydroxy corresponding base"
ccggguaguggagcggguutt

SEQ ID NO: 1041 - DNA, 21 bp, Artificial sequence
  siRNAs to PCSK9
  modified_base 1..19: /mod_base = "2'-hydroxy corresponding base"
ccgcuccacuacccggcagtt

SEQ ID NO: 1042 - DNA, 21 bp, Artificial sequence
  siRNAs to PCSK9
  modified_base 1..19: /mod_base = "2'-hydroxy corresponding base"
cugccggguaguggagcggtt

SEQ ID NO: 1043 - DNA, 21 bp, Artificial sequence
  siRNAs to PCSK9
  modified_base 1..19: /mod_base = "2'-hydroxy corresponding base"
cuacccggcaggguacacatt

SEQ ID NO: 1044 - DNA, 21 bp, Artificial sequence
  siRNAs to PCSK9
  modified_base 1..19: /mod_base = "2'-hydroxy corresponding base"
uguguacccugccggguagtt

SEQ ID NO: 1045 - DNA, 21 bp, Artificial sequence
  siRNAs to PCSK9
  modified_base 1..19: /mod_base = "2'-hydroxy corresponding base"
uacccggcaggguacacautt

SEQ ID NO: 1046 - DNA, 21 bp, Artificial sequence
  siRNAs to PCSK9
  modified_base 1..19: /mod_base = "2'-hydroxy corresponding base"
auguguacccugccggguatt

SEQ ID NO: 1047 - DNA, 21 bp, Artificial sequence
  siRNAs to PCSK9
  modified_base 1..19: /mod_base = "2'-hydroxy corresponding base"
acccggcaggguacacauutt

SEQ ID NO: 1048 - DNA, 21 bp, Artificial sequence
  siRNAs to PCSK9
  modified_base 1..19: /mod_base = "2'-hydroxy corresponding base"
aauguguacccugccgggutt

SEQ ID NO: 1049 - DNA, 21 bp, Artificial sequence
  siRNAs to PCSK9
  modified_base 1..19: /mod_base = "2'-hydroxy corresponding base"
cccggcaggguacacauuctt

SEQ ID NO: 1050 - DNA, 21 bp, Artificial sequence
  siRNAs to PCSK9
  modified_base 1..19: /mod_base = "2'-hydroxy corresponding base"
gaauguguacccugccgggtt

SEQ ID NO: 1051 - DNA, 21 bp, Artificial sequence
  siRNAs to PCSK9
  modified_base 1..19: /mod_base = "2'-hydroxy corresponding base"
cggcaggguacacauucgctt

SEQ ID NO: 1052 - DNA, 21 bp, Artificial sequence
  siRNAs to PCSK9
  modified_base 1..19: /mod_base = "2'-hydroxy corresponding base"
gcgaauguguacccugccgtt

SEQ ID NO: 1053 - DNA, 21 bp, Artificial sequence
  siRNAs to PCSK9
  modified_base 1..19: /mod_base = "2'-hydroxy corresponding base"
gcaggguacacauucgcactt

SEQ ID NO: 1054 - DNA, 21 bp, Artificial sequence
  siRNAs to PCSK9
  modified_base 1..19: /mod_base = "2'-hydroxy corresponding base"
gugcgaauguguacccugctt

SEQ ID NO: 1055 - DNA, 21 bp, Artificial sequence
  siRNAs to PCSK9
  modified_base 1..19: /mod_base = "2'-hydroxy corresponding base"
caggguacacauucgcacctt

SEQ ID NO: 1056 - DNA, 21 bp, Artificial sequence
  siRNAs to PCSK9
  modified_base 1..19: /mod_base = "2'-hydroxy corresponding base"
ggugcgaauguguacccugtt

SEQ ID NO: 1057 - DNA, 21 bp, Artificial sequence
  siRNAs to PCSK9
  modified_base 1..19: /mod_base = "2'-hydroxy corresponding base"
aggguacacauucgcaccctt

SEQ ID NO: 1058 - DNA, 21 bp, Artificial sequence
  siRNAs to PCSK9
  modified_base 1..19: /mod_base = "2'-hydroxy corresponding base"
gggugcgaauguguacccutt

SEQ ID NO: 1059 - DNA, 21 bp, Artificial sequence
  siRNAs to PCSK9
  modified_base 1..19: /mod_base = "2'-hydroxy corresponding base"
ggaacugagccagaaacgctt

SEQ ID NO: 1060 - DNA, 21 bp, Artificial sequence
  siRNAs to PCSK9
  modified_base 1..19: /mod_base = "2'-hydroxy corresponding base"
gcguuucuggcucaguucctt

SEQ ID NO: 1061 - DNA, 21 bp, Artificial sequence
  siRNAs to PCSK9
  modified_base 1..19: /mod_base = "2'-hydroxy corresponding base"
gaacugagccagaaacgcatt

SEQ ID NO: 1062 - DNA, 21 bp, Artificial sequence
  siRNAs to PCSK9
  modified_base 1..19: /mod_base = "2'-hydroxy corresponding base"
ugcguuucuggcucaguuctt

SEQ ID NO: 1063 - DNA, 21 bp, Artificial sequence
  siRNAs to PCSK9
  modified_base 1..19: /mod_base = "2'-hydroxy corresponding base"
aacugagccagaaacgcagtt

SEQ ID NO: 1064 - DNA, 21 bp, Artificial sequence
  siRNAs to PCSK9
  modified_base 1..19: /mod_base = "2'-hydroxy corresponding base"
cugcguuucuggcucaguutt

SEQ ID NO: 1065 - DNA, 21 bp, Artificial sequence
  siRNAs to PCSK9
  modified_base 1..19: /mod_base = "2'-hydroxy corresponding base"
ugagccagaaacgcagauutt

SEQ ID NO: 1066 - DNA, 21 bp, Artificial sequence
  siRNAs to PCSK9
  modified_base 1..19: /mod_base = "2'-hydroxy corresponding base"
aaucugcguuucuggcucatt

SEQ ID NO: 1067 - DNA, 21 bp, Artificial sequence
  siRNAs to PCSK9
  modified_base 1..19: /mod_base = "2'-hydroxy corresponding base"
agaaacgcagauugggcugtt

SEQ ID NO: 1068 - DNA, 21 bp, Artificial sequence
  siRNAs to PCSK9
  modified_base 1..19: /mod_base = "2'-hydroxy corresponding base"
cagcccaaucugcguuucutt

SEQ ID NO: 1069 - DNA, 21 bp, Artificial sequence
  siRNAs to PCSK9
  modified_base 1..19: /mod_base = "2'-hydroxy corresponding base"
aacgcagauugggcuggcutt

SEQ ID NO: 1070 - DNA, 21 bp, Artificial sequence
  siRNAs to PCSK9
  modified_base 1..19: /mod_base = "2'-hydroxy corresponding base"
agccagcccaaucugcguutt

SEQ ID NO: 1071 - DNA, 21 bp, Artificial sequence
  siRNAs to PCSK9
  modified_base 21: /mod_base = "5'-thio thymidine"
  modified_base 1..19: /mod_base = "2'-hydroxy corresponding base"
agccaagccucuucuuacutt

SEQ ID NO: 1072 - DNA, 21 bp, Artificial sequence
  siRNAs to PCSK9
  modified_base 21: /mod_base = "5'-thio thymidine"
  modified_base 1..19: /mod_base = "2'-hydroxy corresponding base"
aguaagaagaggcuuggcutt

SEQ ID NO: 1073 - DNA, 21 bp, Artificial sequence
  siRNAs to PCSK9
  modified_base 3, 4, 8, 9, 10, 11, 12, 13, 14, 15, 16, 18, 19: /mod_base = "2'-O-methyl corresponding base"
  modified_base 21: /mod_base = "5'-thio thymidine"
  modified_base 1, 2, 5, 6, 7, 17: /mod_base = "2'-hydroxy corresponding base"
agccaagccucuucuuacutt

SEQ ID NO: 1074 - DNA, 21 bp, Artificial sequence
  siRNAs to PCSK9
  modified_base 3: /mod_base = "2'-O-methyl corresponding base"
  modified_base 21: /mod_base = "5'-thio thymidine"
  modified_base 1, 2, 4, 5, 6, 7, 8, 9, 10, 11, 12, 13, 14, 15, 16, 17, 18, 19: /mod_base = "2'-hydroxy corresponding base"
aguaagaagaggcuuggcutt

SEQ ID NO: 1075 - DNA, 21 bp, Artificial sequence
  siRNAs to PCSK9
  modified_base 2, 4, 6, 8, 10, 12, 14, 16, 18: /mod_base = "2'-O-methyl corresponding base"
  modified_base 1, 3, 5, 7, 9, 11, 13, 15, 17, 19: /mod_base = "2'-deoxy-2'-fluoro corresponding base"
  modified_base 21: /mod_base = "5'-thio thymidine"
agccaagccucuucuuacutt

SEQ ID NO: 1076 - DNA, 21 bp, Artificial sequence
  siRNAs to PCSK9
  modified_base 1, 3, 5, 7, 9, 11, 13, 15, 17, 19: /mod_base = "2'-O-methyl corresponding base"
  modified_base 2, 4, 6, 8, 10, 12, 14, 16, 18: /mod_base = "2'-deoxy-2'-fluoro corresponding base"
  modified_base 21: /mod_base = "5'-thio thymidine"
aguaagaagaggcuuggcutt

SEQ ID NO: 1077 - DNA, 21 bp, Artificial sequence
  siRNAs to PCSK9
  modified_base 3, 4, 8, 9, 10, 11, 12, 13, 14, 15, 16, 18, 19: /mod_base = "2'-deoxy-2'-fluoro corresponding base"
  modified_base 21: /mod_base = "5'-thio thymidine"
  modified_base 1, 2, 5, 6, 7, 17: /mod_base = "2'-hydroxy corresponding base"
agccaagccucuucuuacutt

SEQ ID NO: 1078 - DNA, 21 bp, Artificial sequence
  siRNAs to PCSK9
  modified_base 3, 13, 14, 15, 18, 19: /mod_base = "2'-deoxy-2'-fluoro corresponding base"
  modified_base 21: /mod_base = "5'-thio thymidine"
  modified_base 1, 2, 4, 5, 6, 7, 8, 9, 10, 11, 12, 16, 17: /mod_base = "2'-hydroxy corresponding base"
aguaagaagaggcuuggcutt

SEQ ID NO: 1079 - DNA, 21 bp, Artificial sequence
  siRNAs to PCSK9
  modified_base 2, 4, 6, 8, 10, 12, 14, 16, 18: /mod_base = "2'-O-methyl corresponding base"
  modified_base 21: /mod_base = "5'-thio thymidine"
  modified_base 1, 3, 5, 7, 9, 11, 13, 15, 17, 19: /mod_base = "2'-hydroxy corresponding base"
agccaagccucuucuuacutt

SEQ ID NO: 1080 - DNA, 21 bp, Artificial sequence
  siRNAs to PCSK9
  modified_base 1, 3, 5, 7, 9, 11, 13, 15, 17, 19: /mod_base = "2'-O-methyl corresponding base"
  modified_base 2, 4, 6, 8, 10, 12, 14, 16, 18: /mod_base = "2'-deoxy-2'-fluoro corresponding base"
  modified_base 21: /mod_base = "5'-thio thymidine"
aguaagaagaggcuuggcutt

SEQ ID NO: 1081 - DNA, 21 bp, Artificial sequence
  siRNAs to PCSK9
  modified_base 2, 4, 6, 8, 10, 12, 14, 16, 18: /mod_base = "2'-O-methyl corresponding base"
  modified_base 21: /mod_base = "5'-thio thymidine"
  modified_base 1, 3, 5, 7, 9, 11, 13, 15, 17, 19: /mod_base = "2'-hydroxy corresponding base"
agccaagccucuucuuacutt

SEQ ID NO: 1082 - DNA, 21 bp, Artificial sequence
  siRNAs to PCSK9
  modified_base 3, 13, 14, 15, 18, 19: /mod_base = "2'-deoxy-2'-fluoro corresponding base"
  modified_base 21: /mod_base = "5'-thio thymidine"
  modified_base 1, 2, 4, 5, 6, 7, 8, 9, 10, 11, 12, 16, 17: /mod_base = "2'-hydroxy corresponding base"
aguaagaagaggcuuggcutt

SEQ ID NO: 1083 - DNA, 21 bp, Artificial sequence
  siRNAs to PCSK9
  modified_base 2, 4, 6, 8, 10, 12, 14, 16, 18: /mod_base = "2'-O-methyl corresponding base"
  modified_base 1, 3, 5, 7, 9, 11, 13, 15, 17, 19: /mod_base = "2'-deoxy-2'-fluoro corresponding base"
  modified_base 21: /mod_base = "5'-thio thymidine"
agccaagccucuucuuacutt

SEQ ID NO: 1084 - DNA, 21 bp, Artificial sequence
  siRNAs to PCSK9
  modified_base 6, 7, 10, 11, 17, 18, 19: /mod_base = "2'-O-methyl corresponding base"
  modified_base 21: /mod_base = "5'-thio thymidine"
  modified_base 1, 2, 3, 4, 5, 8, 9, 12, 13, 14, 15, 16: /mod_base = "2'-hydroxy corresponding base"
aguaagaagaggcuuggcutt

SEQ ID NO: 1085 - DNA, 21 bp, Artificial sequence
  siRNAs to PCSK9
  modified_base 3, 4, 8, 9, 10, 11, 12, 13, 14, 15, 16, 18, 19: /mod_base = "2'-deoxy-2'-fluoro corresponding base"
  modified_base 21: /mod_base = "5'-thio thymidine"
  modified_base 1, 2, 5, 6, 7, 17: /mod_base = "2'-hydroxy corresponding base"
agccaagccucuucuuacutt

SEQ ID NO: 1086 - DNA, 21 bp, Artificial sequence
  siRNAs to PCSK9
  modified_base 6, 7, 10, 11, 17, 18, 19: /mod_base = "2'-O-methyl corresponding base"
  modified_base 21: /mod_base = "5'-thio thymidine"
  modified_base 1, 2, 3, 4, 5, 8, 9, 12, 13, 14, 15, 16: /mod_base = "2'-hydroxy corresponding base"
aguaagaagaggcuuggcutt

SEQ ID NO: 1087 - DNA, 21 bp, Artificial sequence
  siRNAs to PCSK9
  modified_base 2, 4, 6, 8, 10, 12, 14, 16, 18: /mod_base = "2'-O-methyl corresponding base"
  modified_base 21: /mod_base = "5'-thio thymidine"
  modified_base 1, 3, 5, 7, 9, 11, 13, 15, 17, 19: /mod_base = "2'-hydroxy corresponding base"
agccaagccucuucuuacutt

SEQ ID NO: 1088 - DNA, 21 bp, Artificial sequence
  siRNAs to PCSK9
  modified_base 6, 7, 10, 11, 17, 18, 19: /mod_base = "2'-O-methyl corresponding base"
  modified_base 21: /mod_base = "5'-thio thymidine"
  modified_base 1, 2, 3, 4, 5, 8, 9, 12, 13, 14, 15, 16: /mod_base = "2'-hydroxy corresponding base"
aguaagaagaggcuuggcutt

SEQ ID NO: 1089 - DNA, 21 bp, Artificial sequence
  siRNAs to PCSK9
  modified_base 2, 4, 6, 8, 10, 12, 14, 16, 18: /mod_base = "2'-O-methyl corresponding base"
  modified_base 1, 3, 5, 7, 9, 11, 13, 15, 17, 19: /mod_base = "2'-deoxy-2'-fluoro corresponding base"
  modified_base 21: /mod_base = "5'-thio thymidine"
ugguucccugaggaccagctt

SEQ ID NO: 1090 - DNA, 21 bp, Artificial sequence
  siRNAs to PCSK9
  modified_base 1, 3, 5, 7, 9, 11, 13, 15, 17, 19: /mod_base = "2'-O-methyl corresponding base"
  modified_base 2, 4, 6, 8, 10, 12, 14, 16, 18: /mod_base = "2'-deoxy-2'-fluoro corresponding base"
  modified_base 21: /mod_base = "5'-thio thymidine"
gcugguccucagggaaccatt

SEQ ID NO: 1091 - DNA, 21 bp, Artificial sequence
  siRNAs to PCSK9
  modified_base 1, 4, 5, 6, 7, 8, 9, 15, 16, 19: /mod_base = "2'-deoxy-2'-fluoro corresponding base"
  modified_base 21: /mod_base = "5'-thio thymidine"
  modified_base 2, 3, 10, 11, 12, 13, 14, 17, 18: /mod_base = "2'-hydroxy corresponding base"
ugguucccugaggaccagctt

SEQ ID NO: 1092 - DNA, 21 bp, Artificial sequence
  siRNAs to PCSK9
  modified_base 2, 3, 6, 7, 8, 9, 10, 17, 18: /mod_base = "2'-deoxy-2'-fluoro corresponding base"
  modified_base 21: /mod_base = "5'-thio thymidine"
  modified_base 1, 4, 5, 11, 12, 13, 14, 15, 16, 19: /mod_base = "2'-hydroxy corresponding base"
gcugguccucagggaaccatt

SEQ ID NO: 1093 - DNA, 21 bp, Artificial sequence
  siRNAs to PCSK9
  modified_base 2, 4, 6, 8, 10, 12, 14, 16, 18: /mod_base = "2'-O-methyl corresponding base"
  modified_base 21: /mod_base = "5'-thio thymidine"
  modified_base 1, 3, 5, 7, 9, 11, 13, 15, 17, 19: /mod_base = "2'-hydroxy corresponding base"
ugguucccugaggaccagctt

SEQ ID NO: 1094 - DNA, 21 bp, Artificial sequence
  siRNAs to PCSK9
  modified_base 1, 3, 5, 7, 9, 11, 13, 15, 17, 19: /mod_base = "2'-O-methyl corresponding base"
  modified_base 2, 4, 6, 8, 10, 12, 14, 16, 18: /mod_base = "2'-deoxy-2'-fluoro corresponding base"
  modified_base 21: /mod_base = "5'-thio thymidine"
gcugguccucagggaaccatt

SEQ ID NO: 1095 - DNA, 21 bp, Artificial sequence
  siRNAs to PCSK9
  modified_base 2, 4, 6, 8, 10, 12, 14, 16, 18: /mod_base = "2'-O-methyl corresponding base"
  modified_base 21: /mod_base = "5'-thio thymidine"
  modified_base 1, 3, 5, 7, 9, 11, 13, 15, 17, 19: /mod_base = "2'-hydroxy corresponding base"
ugguucccugaggaccagctt

SEQ ID NO: 1096 - DNA, 21 bp, Artificial sequence
  siRNAs to PCSK9
  modified_base 2, 3, 6, 7, 8, 9, 10, 17, 18: /mod_base = "2'-deoxy-2'-fluoro corresponding base"
  modified_base 21: /mod_base = "5'-thio thymidine"
  modified_base 1, 4, 5, 11, 12, 13, 14, 15, 16, 19: /mod_base = "2'-hydroxy corresponding base"
gcugguccucagggaaccatt

SEQ ID NO: 1097 - DNA, 21 bp, Artificial sequence
  siRNAs to PCSK9
  modified_base 2, 4, 6, 8, 10, 12, 14, 16, 18: /mod_base = "2'-O-methyl corresponding base"
  modified_base 1, 3, 5, 7, 9, 11, 13, 15, 17, 19: /mod_base = "2'-deoxy-2'-fluoro corresponding base"
  modified_base 21: /mod_base = "5'-thio thymidine"
ugguucccugaggaccagctt

SEQ ID NO: 1098 - DNA, 21 bp, Artificial sequence
  siRNAs to PCSK9
  modified_base 6, 7, 10, 11, 17, 18, 19: /mod_base = "2'-O-methyl corresponding base"
  modified_base 21: /mod_base = "5'-thio thymidine"
  modified_base 1, 2, 3, 4, 5, 8, 9, 12, 13, 14, 15, 16: /mod_base = "2'-hydroxy corresponding base"
gcugguccucagggaaccatt

SEQ ID NO: 1099 - DNA, 21 bp, Artificial sequence
  siRNAs to PCSK9
  modified_base 1, 4, 5, 6, 7, 8, 9, 15, 16, 19: /mod_base = "2'-deoxy-2'-fluoro corresponding base"
  modified_base 21: /mod_base = "5'-thio thymidine"
  modified_base 2, 3, 10, 11, 12, 13, 14, 17, 18: /mod_base = "2'-hydroxy corresponding base"
ugguucccugaggaccagctt

SEQ ID NO: 1100 - DNA, 21 bp, Artificial sequence
  siRNAs to PCSK9
  modified_base 6, 7, 10, 11, 17, 18, 19: /mod_base = "2'-O-methyl corresponding base"
  modified_base 21: /mod_base = "5'-thio thymidine"
  modified_base 1, 2, 3, 4, 5, 8, 9, 12, 13, 14, 15, 16: /mod_base = "2'-hydroxy corresponding base"
gcugguccucagggaaccatt

SEQ ID NO: 1101 - DNA, 21 bp, Artificial sequence
  siRNAs to PCSK9
  modified_base 2, 4, 6, 8, 10, 12, 14, 16, 18: /mod_base = "2'-O-methyl corresponding base"
  modified_base 21: /mod_base = "5'-thio thymidine"
  modified_base 1, 3, 5, 7, 9, 11, 13, 15, 17, 19: /mod_base = "2'-hydroxy corresponding base"
ugguucccugaggaccagctt

SEQ ID NO: 1102 - DNA, 21 bp, Artificial sequence
  siRNAs to PCSK9
  modified_base 6, 7, 10, 11, 17, 18, 19: /mod_base = "2'-O-methyl corresponding base"
  modified_base 21: /mod_base = "5'-thio thymidine"
  modified_base 1, 2, 3, 4, 5, 8, 9, 12, 13, 14, 15, 16: /mod_base = "2'-hydroxy corresponding base"
gcugguccucagggaaccatt

SEQ ID NO: 1103 - DNA, 21 bp, Artificial sequence
  siRNAs to PCSK9
  modified_base 1..19: /mod_base = "2'-hydroxy corresponding base"
ucuucuuacuucacccggctt

SEQ ID NO: 1104 - DNA, 21 bp, Artificial sequence
  siRNAs to PCSK9
  modified_base 1..19: /mod_base = "2'-hydroxy corresponding base"
gccgggugaaguaagaagatt

SEQ ID NO: 1105 - DNA, 21 bp, Artificial sequence
  siRNAs to PCSK9
  modified_base 1..19: /mod_base = "2'-hydroxy corresponding base"
cuucuuacuucacccggcutt

SEQ ID NO: 1106 - DNA, 21 bp, Artificial sequence
  siRNAs to PCSK9
  modified_base 1..19: /mod_base = "2'-hydroxy corresponding base"
agccgggugaaguaagaagtt

SEQ ID NO: 1107 - DNA, 21 bp, Artificial sequence
  siRNAs to PCSK9
  modified_base 1..19: /mod_base = "2'-hydroxy corresponding base"
uucuuacuucacccggcugtt

SEQ ID NO: 1108 - DNA, 21 bp, Artificial sequence
  siRNAs to PCSK9
  modified_base 1..19: /mod_base = "2'-hydroxy corresponding base"
cagccgggugaaguaagaatt

SEQ ID NO: 1109 - DNA, 21 bp, Artificial sequence
  siRNAs to PCSK9
  modified_base 1..19: /mod_base = "2'-hydroxy corresponding base"
gggcuccucauuuuuacggtt

SEQ ID NO: 1110 - DNA, 21 bp, Artificial sequence
  siRNAs to PCSK9
  modified_base 1..19: /mod_base = "2'-hydroxy corresponding base"
ccguaaaaaugaggagccctt

SEQ ID NO: 1111 - DNA, 21 bp, Artificial sequence
  siRNAs to PCSK9
  modified_base 1..19: /mod_base = "2'-hydroxy corresponding base"
ggcuccucauuuuuacgggtt

SEQ ID NO: 1112 - DNA, 21 bp, Artificial sequence
  siRNAs to PCSK9
  modified_base 1..19: /mod_base = "2'-hydroxy corresponding base"
cccguaaaaaugaggagcctt

SEQ ID NO: 1113 - DNA, 21 bp, Artificial sequence
  siRNAs to PCSK9
  modified_base 1..19: /mod_base = "2'-hydroxy corresponding base"
gcuccucauuuuuacgggutt

SEQ ID NO: 1114 - DNA, 21 bp, Artificial sequence
  siRNAs to PCSK9
  modified_base 1..19: /mod_base = "2'-hydroxy corresponding base"
acccguaaaaaugaggagctt

SEQ ID NO: 1115 - DNA, 21 bp, Artificial sequence
  siRNAs to PCSK9
  modified_base 1..19: /mod_base = "2'-hydroxy corresponding base"
cuccucauuuuuacggguatt

SEQ ID NO: 1116 - DNA, 21 bp, Artificial sequence
  siRNAs to PCSK9
  modified_base 1..19: /mod_base = "2'-hydroxy corresponding base"
uacccguaaaaaugaggagtt

SEQ ID NO: 1117 - DNA, 21 bp, Artificial sequence
  siRNAs to PCSK9
  modified_base 1..19: /mod_base = "2'-hydroxy corresponding base"
uccucauuuuuacggguaatt

SEQ ID NO: 1118 - DNA, 21 bp, Artificial sequence
  siRNAs to PCSK9
  modified_base 1..19: /mod_base = "2'-hydroxy corresponding base"
uuacccguaaaaaugaggatt

SEQ ID NO: 1119 - DNA, 21 bp, Artificial sequence
  siRNAs to PCSK9
  modified_base 1..19: /mod_base = "2'-hydroxy corresponding base"
ccucauuuuuacggguaactt

SEQ ID NO: 1120 - DNA, 21 bp, Artificial sequence
  siRNAs to PCSK9
  modified_base 1..19: /mod_base = "2'-hydroxy corresponding base"
guuacccguaaaaaugaggtt

SEQ ID NO: 1121 - DNA, 21 bp, Artificial sequence
  siRNAs to PCSK9
  modified_base 1..19: /mod_base = "2'-hydroxy corresponding base"
cucauuuuuacggguaacatt

SEQ ID NO: 1122 - DNA, 21 bp, Artificial sequence
  siRNAs to PCSK9
  modified_base 1..19: /mod_base = "2'-hydroxy corresponding base"
uguuacccguaaaaaugagtt

SEQ ID NO: 1123 - DNA, 21 bp, Artificial sequence
  siRNAs to PCSK9
  modified_base 1..19: /mod_base = "2'-hydroxy corresponding base"
cauuuuuacggguaacagutt

SEQ ID NO: 1124 - DNA, 21 bp, Artificial sequence
  siRNAs to PCSK9
  modified_base 1..19: /mod_base = "2'-hydroxy corresponding base"
acuguuacccguaaaaaugtt

SEQ ID NO: 1125 - DNA, 21 bp, Artificial sequence
  siRNAs to PCSK9
  modified_base 1..19: /mod_base = "2'-hydroxy corresponding base"
auuuuuacggguaacagugtt

SEQ ID NO: 1126 - DNA, 21 bp, Artificial sequence
  siRNAs to PCSK9
  modified_base 1..19: /mod_base = "2'-hydroxy corresponding base"
cacuguuacccguaaaaautt

SEQ ID NO: 1127 - DNA, 21 bp, Artificial sequence
  siRNAs to PCSK9
  modified_base 1..19: /mod_base = "2'-hydroxy corresponding base"
uuuacggguaacagugaggtt

SEQ ID NO: 1128 - DNA, 21 bp, Artificial sequence
  siRNAs to PCSK9
  modified_base 1..19: /mod_base = "2'-hydroxy corresponding base"
ccucacuguuacccguaaatt

SEQ ID NO: 1129 - DNA, 21 bp, Artificial sequence
  siRNAs to PCSK9
  modified_base 1..19: /mod_base = "2'-hydroxy corresponding base"
cagaccaggaagcucggugtt

SEQ ID NO: 1130 - DNA, 21 bp, Artificial sequence
  siRNAs to PCSK9
  modified_base 1..19: /mod_base = "2'-hydroxy corresponding base"
caccgagcuuccuggucugtt

SEQ ID NO: 1131 - DNA, 21 bp, Artificial sequence
  siRNAs to PCSK9
  modified_base 1..19: /mod_base = "2'-hydroxy corresponding base"
gaccaggaagcucggugagtt

SEQ ID NO: 1132 - DNA, 21 bp, Artificial sequence
  siRNAs to PCSK9
  modified_base 1..19: /mod_base = "2'-hydroxy corresponding base"
cucaccgagcuuccugguctt

SEQ ID NO: 1133 - DNA, 21 bp, Artificial sequence
  siRNAs to PCSK9
  modified_base 1..19: /mod_base = "2'-hydroxy corresponding base"
ccaggaagcucggugagugtt

SEQ ID NO: 1134 - DNA, 21 bp, Artificial sequence
  siRNAs to PCSK9
  modified_base 1..19: /mod_base = "2'-hydroxy corresponding base"
cacucaccgagcuuccuggtt

SEQ ID NO: 1135 - DNA, 21 bp, Artificial sequence
  siRNAs to PCSK9
  modified_base 1..19: /mod_base = "2'-hydroxy corresponding base"
ggaagcucggugagugaugtt

SEQ ID NO: 1136 - DNA, 21 bp, Artificial sequence
  siRNAs to PCSK9
  modified_base 1..19: /mod_base = "2'-hydroxy corresponding base"
caucacucaccgagcuucctt

SEQ ID NO: 1137 - DNA, 21 bp, Artificial sequence
  siRNAs to PCSK9
  modified_base 1..19: /mod_base = "2'-hydroxy corresponding base"
gugagugauggcagaacgatt

SEQ ID NO: 1138 - DNA, 21 bp, Artificial sequence
  siRNAs to PCSK9
  modified_base 1..19: /mod_base = "2'-hydroxy corresponding base"
ucguucugccaucacucactt

SEQ ID NO: 1139 - DNA, 21 bp, Artificial sequence
  siRNAs to PCSK9
  modified_base 1..19: /mod_base = "2'-hydroxy corresponding base"
gagugauggcagaacgaugtt

SEQ ID NO: 1140 - DNA, 21 bp, Artificial sequence
  siRNAs to PCSK9
  modified_base 1..19: /mod_base = "2'-hydroxy corresponding base"
caucguucugccaucacuctt

SEQ ID NO: 1141 - DNA, 21 bp, Artificial sequence
  siRNAs to PCSK9
  modified_base 1..19: /mod_base = "2'-hydroxy corresponding base"
gauggcagaacgaugccugtt

SEQ ID NO: 1142 - DNA, 21 bp, Artificial sequence
  siRNAs to PCSK9
  modified_base 1..19: /mod_base = "2'-hydroxy corresponding base"
caggcaucguucugccauctt

SEQ ID NO: 1143 - DNA, 21 bp, Artificial sequence
  siRNAs to PCSK9
  modified_base 1..19: /mod_base = "2'-hydroxy corresponding base"
agaacgaugccugcaggcatt

SEQ ID NO: 1144 - DNA, 21 bp, Artificial sequence
  siRNAs to PCSK9
  modified_base 1..19: /mod_base = "2'-hydroxy corresponding base"
ugccugcaggcaucguucutt

SEQ ID NO: 1145 - DNA, 21 bp, Artificial sequence
  siRNAs to PCSK9
  modified_base 1..19: /mod_base = "2'-hydroxy corresponding base"
acgaugccugcaggcauggtt

SEQ ID NO: 1146 - DNA, 21 bp, Artificial sequence
  siRNAs to PCSK9
  modified_base 1..19: /mod_base = "2'-hydroxy corresponding base"
ccaugccugcaggcaucgutt

SEQ ID NO: 1147 - DNA, 21 bp, Artificial sequence
  siRNAs to PCSK9
  modified_base 1..19: /mod_base = "2'-hydroxy corresponding base"
gcaggcauggaacuuuuuctt

SEQ ID NO: 1148 - DNA, 21 bp, Artificial sequence
  siRNAs to PCSK9
  modified_base 1..19: /mod_base = "2'-hydroxy corresponding base"
gaaaaaguuccaugccugctt

SEQ ID NO: 1149 - DNA, 21 bp, Artificial sequence
  siRNAs to PCSK9
  modified_base 1..19: /mod_base = "2'-hydroxy corresponding base"
ggaacuuuuuccguuaucatt

SEQ ID NO: 1150 - DNA, 21 bp, Artificial sequence
  siRNAs to PCSK9
  modified_base 1..19: /mod_base = "2'-hydroxy corresponding base"
ugauaacggaaaaaguucctt

SEQ ID NO: 1151 - DNA, 21 bp, Artificial sequence
  siRNAs to PCSK9
  modified_base 1..19: /mod_base = "2'-hydroxy corresponding base"
gaacuuuuuccguuaucactt

SEQ ID NO: 1152 - DNA, 21 bp, Artificial sequence
  siRNAs to PCSK9
  modified_base 1..19: /mod_base = "2'-hydroxy corresponding base"
gugauaacggaaaaaguuctt

SEQ ID NO: 1153 - DNA, 21 bp, Artificial sequence
  siRNAs to PCSK9
  modified_base 1..19: /mod_base = "2'-hydroxy corresponding base"
aacuuuuuccguuaucacctt

SEQ ID NO: 1154 - DNA, 21 bp, Artificial sequence
  siRNAs to PCSK9
  modified_base 1..19: /mod_base = "2'-hydroxy corresponding base"
ggugauaacggaaaaaguutt

SEQ ID NO: 1155 - DNA, 21 bp, Artificial sequence
  siRNAs to PCSK9
  modified_base 1..19: /mod_base = "2'-hydroxy corresponding base"
uaucacccaggccugauuctt

SEQ ID NO: 1156 - DNA, 21 bp, Artificial sequence
  siRNAs to PCSK9
  modified_base 1..19: /mod_base = "2'-hydroxy corresponding base"
gaaucaggccugggugauatt

SEQ ID NO: 1157 - DNA, 21 bp, Artificial sequence
  siRNAs to PCSK9
  modified_base 1..19: /mod_base = "2'-hydroxy corresponding base"
aggccugauucacuggccutt

SEQ ID NO: 1158 - DNA, 21 bp, Artificial sequence
  siRNAs to PCSK9
  modified_base 1..19: /mod_base = "2'-hydroxy corresponding base"
aggccagugaaucaggccutt

SEQ ID NO: 1159 - DNA, 21 bp, Artificial sequence
  siRNAs to PCSK9
  modified_base 1..19: /mod_base = "2'-hydroxy corresponding base"
ugauucacuggccuggcggtt

SEQ ID NO: 1160 - DNA, 21 bp, Artificial sequence
  siRNAs to PCSK9
  modified_base 1..19: /mod_base = "2'-hydroxy corresponding base"
ccgccaggccagugaaucatt

SEQ ID NO: 1161 - DNA, 21 bp, Artificial sequence
  siRNAs to PCSK9
  modified_base 1..19: /mod_base = "2'-hydroxy corresponding base"
auucacuggccuggcggagtt

SEQ ID NO: 1162 - DNA, 21 bp, Artificial sequence
  siRNAs to PCSK9
  modified_base 1..19: /mod_base = "2'-hydroxy corresponding base"
cuccgccaggccagugaautt

SEQ ID NO: 1163 - DNA, 21 bp, Artificial sequence
  siRNAs to PCSK9
  modified_base 1..19: /mod_base = "2'-hydroxy corresponding base"
gcuucuaaggcauggucggtt

SEQ ID NO: 1164 - DNA, 21 bp, Artificial sequence
  siRNAs to PCSK9
  modified_base 1..19: /mod_base = "2'-hydroxy corresponding base"
ccgaccaugccuuagaagctt

SEQ ID NO: 1165 - DNA, 21 bp, Artificial sequence
  siRNAs to PCSK9
  modified_base 1..19: /mod_base = "2'-hydroxy corresponding base"
cuucuaaggcauggucgggtt

SEQ ID NO: 1166 - DNA, 21 bp, Artificial sequence
  siRNAs to PCSK9
  modified_base 1..19: /mod_base = "2'-hydroxy corresponding base"
cccgaccaugccuuagaagtt

SEQ ID NO: 1167 - DNA, 21 bp, Artificial sequence
  siRNAs to PCSK9
  modified_base 1..19: /mod_base = "2'-hydroxy corresponding base"
gagggccaacaacuguccctt

SEQ ID NO: 1168 - DNA, 21 bp, Artificial sequence
  siRNAs to PCSK9
  modified_base 1..19: /mod_base = "2'-hydroxy corresponding base"
gggacaguuguuggcccuctt

SEQ ID NO: 1169 - DNA, 21 bp, Artificial sequence
  siRNAs to PCSK9
  modified_base 21: /mod_base = "5'-thio thymidine"
  modified_base 1..19: /mod_base = "2'-hydroxy corresponding base"
acugucccuccuugagcactt

SEQ ID NO: 1170 - DNA, 21 bp, Artificial sequence
  siRNAs to PCSK9
  modified_base 21: /mod_base = "5'-thio thymidine"
  modified_base 1..19: /mod_base = "2'-hydroxy corresponding base"
gugcucaaggagggacagutt

SEQ ID NO: 1171 - DNA, 21 bp, Artificial sequence
  siRNAs to PCSK9
  modified_base 2, 3, 5, 6, 7, 8, 9, 10, 11, 12, 13, 17, 19: /mod_base = "2'-O-methyl corresponding base"
  modified_base 21: /mod_base = "5'-thio thymidine"
  modified_base 1, 4, 14, 15, 16, 18: /mod_base = "2'-hydroxy corresponding base"
acugucccuccuugagcactt

SEQ ID NO: 1172 - DNA, 21 bp, Artificial sequence
  siRNAs to PCSK9
  modified_base 6, 16: /mod_base = "2'-O-methyl corresponding base"
  modified_base 21: /mod_base = "5'-thio thymidine"
  modified_base 1, 2, 3, 4, 5, 7, 8, 9, 10, 11, 12, 13, 14, 15, 17, 18, 19: /mod_base = "2'-hydroxy corresponding base"
gugcucaaggagggacagutt

SEQ ID NO: 1173 - DNA, 21 bp, Artificial sequence
  siRNAs to PCSK9
  modified_base 21: /mod_base = "5'-thio thymidine"
  modified_base 1..19: /mod_base = "2'-hydroxy corresponding base"
cugucccuccuugagcacctt

SEQ ID NO: 1174 - DNA, 21 bp, Artificial sequence
  siRNAs to PCSK9
  modified_base 21: /mod_base = "5'-thio thymidine"
  modified_base 1..19: /mod_base = "2'-hydroxy corresponding base"
ggugcucaaggagggacagtt

SEQ ID NO: 1175 - DNA, 21 bp, Artificial sequence
  siRNAs to PCSK9
  modified_base 1, 2, 4, 5, 6, 7, 8, 9, 10, 11, 12, 16, 18, 19: /mod_base = "2'-O-methyl corresponding base"
  modified_base 21: /mod_base = "5'-thio thymidine"
  modified_base 3, 13, 14, 15, 17: /mod_base = "2'-hydroxy corresponding base"
cugucccuccuugagcacctt

SEQ ID NO: 1176 - DNA, 21 bp, Artificial sequence
  siRNAs to PCSK9
  modified_base 7, 17: /mod_base = "2'-O-methyl corresponding base"
  modified_base 21: /mod_base = "5'-thio thymidine"
  modified_base 1, 2, 3, 4, 5, 6, 8, 9, 10, 11, 12, 13, 14, 15, 16, 18, 19: /mod_base = "2'-hydroxy corresponding base"
ggugcucaaggagggacagtt

SEQ ID NO: 1177 - DNA, 21 bp, Artificial sequence
  siRNAs to PCSK9
  modified_base 21: /mod_base = "5'-thio thymidine"
  modified_base 1..19: /mod_base = "2'-hydroxy corresponding base"
acauuuaucuuuugggucutt

SEQ ID NO: 1178 - DNA, 21 bp, Artificial sequence
  siRNAs to PCSK9
  modified_base 21: /mod_base = "5'-thio thymidine"
  modified_base 1..19: /mod_base = "2'-hydroxy corresponding base"
agacccaaaagauaaaugutt

SEQ ID NO: 1179 - DNA, 21 bp, Artificial sequence
  siRNAs to PCSK9
  modified_base 2, 4, 5, 6, 8, 9, 10, 11, 12, 13, 17, 18, 19: /mod_base = "2'-O-methyl corresponding base"
  modified_base 21: /mod_base = "5'-thio thymidine"
  modified_base 1, 3, 7, 14, 15, 16: /mod_base = "2'-hydroxy corresponding base"
acauuuaucuuuugggucutt

SEQ ID NO: 1180 - DNA, 21 bp, Artificial sequence
  siRNAs to PCSK9
  modified_base 6, 13: /mod_base = "2'-O-methyl corresponding base"
  modified_base 21: /mod_base = "5'-thio thymidine"
  modified_base 1, 2, 3, 4, 5, 7, 8, 9, 10, 11, 12, 14, 15, 16, 17, 18, 19: /mod_base = "2'-hydroxy corresponding base"
agacccaaaagauaaaugutt

SEQ ID NO: 1181 - DNA, 21 bp, Artificial sequence
  siRNAs to PCSK9
  modified_base 2, 4, 6, 8, 10, 12, 14, 16, 18: /mod_base = "2'-O-methyl corresponding base"
  modified_base 1, 3, 5, 7, 9, 11, 13, 15, 17, 19: /mod_base = "2'-deoxy-2'-fluoro corresponding base"
  modified_base 21: /mod_base = "5'-thio thymidine"
acauuuaucuuuugggucutt

SEQ ID NO: 1182 - DNA, 21 bp, Artificial sequence
  siRNAs to PCSK9
  modified_base 1, 3, 5, 7, 9, 11, 13, 15, 17, 19: /mod_base = "2'-O-methyl corresponding base"
  modified_base 2, 4, 6, 8, 10, 12, 14, 16, 18: /mod_base = "2'-deoxy-2'-fluoro corresponding base"
  modified_base 21: /mod_base = "5'-thio thymidine"
agacccaaaagauaaaugutt

SEQ ID NO: 1183 - DNA, 21 bp, Artificial sequence
  siRNAs to PCSK9
  modified_base 2, 4, 5, 6, 8, 9, 10, 11, 12, 13, 17, 18, 19: /mod_base = "2'-deoxy-2'-fluoro corresponding base"
  modified_base 21: /mod_base = "5'-thio thymidine"
  modified_base 1, 3, 7, 14, 15, 16: /mod_base = "2'-hydroxy corresponding base"
acauuuaucuuuugggucutt

SEQ ID NO: 1184 - DNA, 21 bp, Artificial sequence
  siRNAs to PCSK9
  modified_base 4, 5, 6, 13, 17, 19: /mod_base = "2'-deoxy-2'-fluoro corresponding base"
  modified_base 21: /mod_base = "5'-thio thymidine"
  modified_base 1, 2, 3, 7, 8, 9, 10, 11, 12, 14, 15, 16, 18: /mod_base = "2'-hydroxy corresponding base"
agacccaaaagauaaaugutt

SEQ ID NO: 1185 - DNA, 21 bp, Artificial sequence
  siRNAs to PCSK9
  modified_base 2, 4, 6, 8, 10, 12, 14, 16, 18: /mod_base = "2'-O-methyl corresponding base"
  modified_base 21: /mod_base = "5'-thio thymidine"
  modified_base 1, 3, 5, 7, 9, 11, 13, 15, 17, 19: /mod_base = "2'-hydroxy corresponding base"
acauuuaucuuuugggucutt

SEQ ID NO: 1186 - DNA, 21 bp, Artificial sequence
  siRNAs to PCSK9
  modified_base 1, 3, 5, 7, 9, 11, 13, 15, 17, 19: /mod_base = "2'-O-methyl corresponding base"
  modified_base 2, 4, 6, 8, 10, 12, 14, 16, 18: /mod_base = "2'-deoxy-2'-fluoro corresponding base"
  modified_base 21: /mod_base = "5'-thio thymidine"
agacccaaaagauaaaugutt

SEQ ID NO: 1187 - DNA, 21 bp, Artificial sequence
  siRNAs to PCSK9
  modified_base 2, 4, 6, 8, 10, 12, 14, 16, 18: /mod_base = "2'-O-methyl corresponding base"
  modified_base 21: /mod_base = "5'-thio thymidine"
  modified_base 1, 3, 5, 7, 9, 11, 13, 15, 17, 19: /mod_base = "2'-hydroxy corresponding base"
acauuuaucuuuugggucutt

SEQ ID NO: 1188 - DNA, 21 bp, Artificial sequence
  siRNAs to PCSK9
  modified_base 4, 5, 6, 13, 17, 19: /mod_base = "2'-deoxy-2'-fluoro corresponding base"
  modified_base 21: /mod_base = "5'-thio thymidine"
  modified_base 1, 2, 3, 7, 8, 9, 10, 11, 12, 14, 15, 16, 18: /mod_base = "2'-hydroxy corresponding base"
agacccaaaagauaaaugutt

SEQ ID NO: 1189 - DNA, 21 bp, Artificial sequence
  siRNAs to PCSK9
  modified_base 2, 4, 6, 8, 10, 12, 14, 16, 18: /mod_base = "2'-O-methyl corresponding base"
  modified_base 1, 3, 5, 7, 9, 11, 13, 15, 17, 19: /mod_base = "2'-deoxy-2'-fluoro corresponding base"
  modified_base 21: /mod_base = "5'-thio thymidine"
acauuuaucuuuugggucutt

SEQ ID NO: 1190 - DNA, 21 bp, Artificial sequence
  siRNAs to PCSK9
  modified_base 6, 7, 10, 11, 17, 18, 19: /mod_base = "2'-O-methyl corresponding base"
  modified_base 21: /mod_base = "5'-thio thymidine"
  modified_base 1, 2, 3, 4, 5, 8, 9, 12, 13, 14, 15, 16: /mod_base = "2'-hydroxy corresponding base"
agacccaaaagauaaaugutt

SEQ ID NO: 1191 - DNA, 21 bp, Artificial sequence
  siRNAs to PCSK9
  modified_base 2, 4, 5, 6, 8, 9, 10, 11, 12, 13, 17, 18, 19: /mod_base = "2'-deoxy-2'-fluoro corresponding base"
  modified_base 21: /mod_base = "5'-thio thymidine"
  modified_base 1, 3, 7, 14, 15, 16: /mod_base = "2'-hydroxy corresponding base"
acauuuaucuuuugggucutt

SEQ ID NO: 1192 - DNA, 21 bp, Artificial sequence
  siRNAs to PCSK9
  modified_base 6, 7, 10, 11, 17, 18, 19: /mod_base = "2'-O-methyl corresponding base"
  modified_base 21: /mod_base = "5'-thio thymidine"
  modified_base 1, 2, 3, 4, 5, 8, 9, 12, 13, 14, 15, 16: /mod_base = "2'-hydroxy corresponding base"
agacccaaaagauaaaugutt

SEQ ID NO: 1193 - DNA, 21 bp, Artificial sequence
  siRNAs to PCSK9
  modified_base 2, 4, 6, 8, 10, 12, 14, 16, 18: /mod_base = "2'-O-methyl corresponding base"
  modified_base 21: /mod_base = "5'-thio thymidine"
  modified_base 1, 3, 5, 7, 9, 11, 13, 15, 17, 19: /mod_base = "2'-hydroxy corresponding base"
acauuuaucuuuugggucutt

SEQ ID NO: 1194 - DNA, 21 bp, Artificial sequence
  siRNAs to PCSK9
  modified_base 6, 7, 10, 11, 17, 18, 19: /mod_base = "2'-O-methyl corresponding base"
  modified_base 21: /mod_base = "5'-thio thymidine"
  modified_base 1, 2, 3, 4, 5, 8, 9, 12, 13, 14, 15, 16: /mod_base = "2'-hydroxy corresponding base"
agacccaaaagauaaaugutt

SEQ ID NO: 1195 - DNA, 21 bp, Artificial sequence
  siRNAs to PCSK9
  modified_base 2, 4, 6, 8, 10, 12, 14, 16, 18: /mod_base = "2'-O-methyl corresponding base"
  modified_base 1, 3, 5, 7, 9, 11, 13, 15, 17, 19: /mod_base = "2'-deoxy-2'-fluoro corresponding base"
  modified_base 21: /mod_base = "5'-thio thymidine"
gccaucugcugccggagcctt

SEQ ID NO: 1196 - DNA, 21 bp, Artificial sequence
  siRNAs to PCSK9
  modified_base 1, 3, 5, 7, 9, 11, 13, 15, 17, 19: /mod_base = "2'-O-methyl corresponding base"
  modified_base 2, 4, 6, 8, 10, 12, 14, 16, 18: /mod_base = "2'-deoxy-2'-fluoro corresponding base"
  modified_base 21: /mod_base = "5'-thio thymidine"
ggcuccggcagcagauggctt

SEQ ID NO: 1197 - DNA, 21 bp, Artificial sequence
  siRNAs to PCSK9
  modified_base 2, 3, 5, 6, 7, 9, 10, 12, 13, 18, 19: /mod_base = "2'-deoxy-2'-fluoro corresponding base"
  modified_base 21: /mod_base = "5'-thio thymidine"
  modified_base 1, 4, 8, 11, 14, 15, 16, 17: /mod_base = "2'-hydroxy corresponding base"
gccaucugcugccggagcctt

SEQ ID NO: 1198 - DNA, 21 bp, Artificial sequence
  siRNAs to PCSK9
  modified_base 3, 4, 5, 6, 9, 12, 16, 19: /mod_base = "2'-deoxy-2'-fluoro corresponding base"
  modified_base 21: /mod_base = "5'-thio thymidine"
  modified_base 1, 2, 7, 8, 10, 11, 13, 14, 15, 17, 18: /mod_base = "2'-hydroxy corresponding base"
ggcuccggcagcagauggctt

SEQ ID NO: 1199 - DNA, 21 bp, Artificial sequence
  siRNAs to PCSK9
  modified_base 2, 4, 6, 8, 10, 12, 14, 16, 18: /mod_base = "2'-O-methyl corresponding base"
  modified_base 21: /mod_base = "5'-thio thymidine"
  modified_base 1, 3, 5, 7, 9, 11, 13, 15, 17, 19: /mod_base = "2'-hydroxy corresponding base"
gccaucugcugccggagcctt

SEQ ID NO: 1200 - DNA, 21 bp, Artificial sequence
  siRNAs to PCSK9
  modified_base 1, 3, 5, 7, 9, 11, 13, 15, 17, 19: /mod_base = "2'-O-methyl corresponding base"
  modified_base 2, 4, 6, 8, 10, 12, 14, 16, 18: /mod_base = "2'-deoxy-2'-fluoro corresponding base"
  modified_base 21: /mod_base = "5'-thio thymidine"
ggcuccggcagcagauggctt

SEQ ID NO: 1201 - DNA, 21 bp, Artificial sequence
  siRNAs to PCSK9
  modified_base 2, 4, 6, 8, 10, 12, 14, 16, 18: /mod_base = "2'-O-methyl corresponding base"
  modified_base 21: /mod_base = "5'-thio thymidine"
  modified_base 1, 3, 5, 7, 9, 11, 13, 15, 17, 19: /mod_base = "2'-hydroxy corresponding base"
gccaucugcugccggagcctt

SEQ ID NO: 1202 - DNA, 21 bp, Artificial sequence
  siRNAs to PCSK9
  modified_base 3, 4, 5, 6, 9, 12, 16, 19: /mod_base = "2'-deoxy-2'-fluoro corresponding base"
  modified_base 21: /mod_base = "5'-thio thymidine"
  modified_base 1, 2, 7, 8, 10, 11, 13, 14, 15, 17, 18: /mod_base = "2'-hydroxy corresponding base"
ggcuccggcagcagauggctt

SEQ ID NO: 1203 - DNA, 21 bp, Artificial sequence
  siRNAs to PCSK9
  modified_base 2, 4, 6, 8, 10, 12, 14, 16, 18: /mod_base = "2'-O-methyl corresponding base"
  modified_base 1, 3, 5, 7, 9, 11, 13, 15, 17, 19: /mod_base = "2'-deoxy-2'-fluoro corresponding base"
  modified_base 21: /mod_base = "5'-thio thymidine"
gccaucugcugccggagcctt

SEQ ID NO: 1204 - DNA, 21 bp, Artificial sequence
  siRNAs to PCSK9
  modified_base 6, 7, 10, 11, 17, 18, 19: /mod_base = "2'-O-methyl corresponding base"
  modified_base 21: /mod_base = "5'-thio thymidine"
  modified_base 1, 2, 3, 4, 5, 8, 9, 12, 13, 14, 15, 16: /mod_base = "2'-hydroxy corresponding base"
ggcucaugcagcagauggctt

SEQ ID NO: 1205 - DNA, 21 bp, Artificial sequence
  siRNAs to PCSK9
  modified_base 2, 3, 5, 6, 7, 9, 10, 12, 13, 18, 19: /mod_base = "2'-deoxy-2'-fluoro corresponding base"
  modified_base 21: /mod_base = "5'-thio thymidine"
  modified_base 1, 4, 8, 11, 14, 15, 16, 17: /mod_base = "2'-hydroxy corresponding base"
gccaucugcugccggagcctt

SEQ ID NO: 1206 - DNA, 21 bp, Artificial sequence
  siRNAs to PCSK9
  modified_base 6, 7, 10, 11, 17, 18, 19: /mod_base = "2'-O-methyl corresponding base"
  modified_base 21: /mod_base = "5'-thio thymidine"
  modified_base 1, 2, 3, 4, 5, 8, 9, 12, 13, 14, 15, 16: /mod_base = "2'-hydroxy corresponding base"
ggcucaugcagcagauggctt

SEQ ID NO: 1207 - DNA, 21 bp, Artificial sequence
  siRNAs to PCSK9
  modified_base 2, 4, 6, 8, 10, 12, 14, 16, 18: /mod_base = "2'-O-methyl corresponding base"
  modified_base 21: /mod_base = "5'-thio thymidine"
  modified_base 1, 3, 5, 7, 9, 11, 13, 15, 17, 19: /mod_base = "2'-hydroxy corresponding base"
gccaucugcugccggagcctt

SEQ ID NO: 1208 - DNA, 21 bp, Artificial sequence
  siRNAs to PCSK9
  modified_base 6, 7, 10, 11, 17, 18, 19: /mod_base = "2'-O-methyl corresponding base"
  modified_base 21: /mod_base = "5'-thio thymidine"
  modified_base 1, 2, 3, 4, 5, 8, 9, 12, 13, 14, 15, 16: /mod_base = "2'-hydroxy corresponding base"
ggcucaugcagcagauggctt

SEQ ID NO: 1209 - DNA, 21 bp, Artificial sequence
  siRNAs to PCSK9
  modified_base 21: /mod_base = "5'-thio thymidine"
  modified_base 1..19: /mod_base = "2'-hydroxy corresponding base"
cauuuaucuuuugggucugtt

SEQ ID NO: 1210 - DNA, 21 bp, Artificial sequence
  siRNAs to PCSK9
  modified_base 21: /mod_base = "5'-thio thymidine"
  modified_base 1..19: /mod_base = "2'-hydroxy corresponding base"
cagacccaaaagauaaaugtt

SEQ ID NO: 1211 - DNA, 21 bp, Artificial sequence
  siRNAs to PCSK9
  modified_base 1, 3, 4, 5, 7, 8, 9, 10, 11, 12, 16, 17, 18: /mod_base = "2'-O-methyl corresponding base"
  modified_base 21: /mod_base = "5'-thio thymidine"
  modified_base 2, 6, 13, 14, 15, 19: /mod_base = "2'-hydroxy corresponding base"
cauuuaucuuuugggucugtt

SEQ ID NO: 1212 - DNA, 21 bp, Artificial sequence
  siRNAs to PCSK9
  modified_base 1, 7, 14: /mod_base = "2'-O-methyl corresponding base"
  modified_base 21: /mod_base = "5'-thio thymidine"
  modified_base 2, 3, 4, 5, 6, 8, 9, 10, 11, 12, 13, 15, 16, 17, 18, 19: /mod_base = "2'-hydroxy corresponding base"
cagacccaaaagauaaaugtt

SEQ ID NO: 1213 - DNA, 21 bp, Artificial sequence
  siRNAs to PCSK9
  modified_base 21: /mod_base = "5'-thio thymidine"
  modified_base 1..19: /mod_base = "2'-hydroxy corresponding base"
uaucuuuugggucuguccutt

SEQ ID NO: 1214 - DNA, 21 bp, Artificial sequence
  siRNAs to PCSK9
  modified_base 21: /mod_base = "5'-thio thymidine"
  modified_base 1..19: /mod_base = "2'-hydroxy corresponding base"
aggacagacccaaaagauatt

SEQ ID NO: 1215 - DNA, 21 bp, Artificial sequence
  siRNAs to PCSK9
  modified_base 1, 3, 4, 5, 6, 7, 8, 12, 13, 14, 16, 17, 18, 19: /mod_base = "2'-O-methyl corresponding base"
  modified_base 21: /mod_base = "5'-thio thymidine"
  modified_base 2, 9, 10, 11, 15: /mod_base = "2'-hydroxy corresponding base"
uaucuuuugggucuguccutt

SEQ ID NO: 1216 - DNA, 21 bp, Artificial sequence
  siRNAs to PCSK9
  modified_base 5, 11, 18: /mod_base = "2'-O-methyl corresponding base"
  modified_base 21: /mod_base = "5'-thio thymidine"
  modified_base 1, 2, 3, 4, 6, 7, 8, 9, 10, 12, 13, 14, 15, 16, 17, 19: /mod_base = "2'-hydroxy corresponding base"
aggacagacccaaaagauatt

SEQ ID NO: 1217 - DNA, 21 bp, Artificial sequence
  siRNAs to PCSK9
  modified_base 21: /mod_base = "5'-thio thymidine"
  modified_base 1..19: /mod_base = "2'-hydroxy corresponding base"
cucuguugccuuuuuacagtt

SEQ ID NO: 1218 - DNA, 21 bp, Artificial sequence
  siRNAs to PCSK9
  modified_base 21: /mod_base = "5'-thio thymidine"
  modified_base 1..19: /mod_base = "2'-hydroxy corresponding base"
cuguaaaaaggcaacagagtt

SEQ ID NO: 1219 - DNA, 21 bp, Artificial sequence
  siRNAs to PCSK9
  modified_base 1, 2, 3, 4, 6, 7, 9, 10, 11, 12, 13, 14, 15, 17: /mod_base = "2'-O-methyl corresponding base"
  modified_base 21: /mod_base = "5'-thio thymidine"
  modified_base 5, 8, 16, 18, 19: /mod_base = "2'-hydroxy corresponding base"
cucuguugccuuuuuacagtt

SEQ ID NO: 1220 - DNA, 21 bp, Artificial sequence
  siRNAs to PCSK9
  modified_base 4, 12, 15: /mod_base = "2'-O-methyl corresponding base"
  modified_base 21: /mod_base = "5'-thio thymidine"
  modified_base 1, 2, 3, 5, 6, 7, 8, 9, 10, 11, 13, 14, 16, 17, 18, 19: /mod_base = "2'-hydroxy corresponding base"
cuguaaaaaggcaacagagtt

SEQ ID NO: 1221 - DNA, 21 bp, Artificial sequence
  siRNAs to PCSK9
  modified_base 1..19: /mod_base = "2'-hydroxy corresponding base"
ccuuuuuacagccaacuuutt

SEQ ID NO: 1222 - DNA, 21 bp, Artificial sequence
  siRNAs to PCSK9
  modified_base 1..19: /mod_base = "2'-hydroxy corresponding base"
aaaguuggcuguaaaaaggtt

SEQ ID NO: 1223 - DNA, 21 bp, Artificial sequence
  siRNAs to PCSK9
  modified_base 1..19: /mod_base = "2'-hydroxy corresponding base"
agccaacuuuucuagaccutt

SEQ ID NO: 1224 - DNA, 21 bp, Artificial sequence
  siRNAs to PCSK9
  modified_base 1..19: /mod_base = "2'-hydroxy corresponding base"
aggucuagaaaaguuggcutt

SEQ ID NO: 1225 - DNA, 21 bp, Artificial sequence
  siRNAs to PCSK9
  modified_base 1..19: /mod_base = "2'-hydroxy corresponding base"
acuuuucuagaccuguuuutt

SEQ ID NO: 1226 - DNA, 21 bp, Artificial sequence
  siRNAs to PCSK9
  modified_base 1..19: /mod_base = "2'-hydroxy corresponding base"
aaaacaggucuagaaaagutt

SEQ ID NO: 1227 - DNA, 21 bp, Artificial sequence
  siRNAs to PCSK9
  modified_base 21: /mod_base = "5'-thio thymidine"
  modified_base 1..19: /mod_base = "2'-hydroxy corresponding base"
uucuagaccuguuuugcuutt

SEQ ID NO: 1228 - DNA, 21 bp, Artificial sequence
  siRNAs to PCSK9
  modified_base 21: /mod_base = "5'-thio thymidine"
  modified_base 1..19: /mod_base = "2'-hydroxy corresponding base"
aagcaaaacaggucuagaatt

SEQ ID NO: 1229 - DNA, 21 bp, Artificial sequence
  siRNAs to PCSK9
  modified_base 1, 2, 3, 4, 8, 9, 10, 12, 13, 14, 15, 17, 18, 19: /mod_base = "2'-O-methyl corresponding base"
  modified_base 21: /mod_base = "5'-thio thymidine"
  modified_base 5, 6, 7, 11, 16: /mod_base = "2'-hydroxy corresponding base"
uucuagaccuguuuugcuutt

SEQ ID NO: 1230 - DNA, 21 bp, Artificial sequence
  siRNAs to PCSK9
  modified_base 4, 9, 15: /mod_base = "2'-O-methyl corresponding base"
  modified_base 21: /mod_base = "5'-thio thymidine"
  modified_base 1, 2, 3, 5, 6, 7, 8, 10, 11, 12, 13, 14, 16, 17, 18, 19: /mod_base = "2'-hydroxy corresponding base"
aagcaaaacaggucuagaatt

SEQ ID NO: 1231 - DNA, 21 bp, Artificial sequence
  siRNAs to PCSK9
  modified_base 2, 4, 6, 8, 10, 12, 14, 16, 18: /mod_base = "2'-O-methyl corresponding base"
  modified_base 1, 3, 5, 7, 9, 11, 13, 15, 17, 19: /mod_base = "2'-deoxy-2'-fluoro corresponding base"
  modified_base 21: /mod_base = "5'-thio thymidine"
uucuagaccuguuuugcuutt

SEQ ID NO: 1232 - DNA, 21 bp, Artificial sequence
  siRNAs to PCSK9
  modified_base 1, 3, 5, 7, 9, 11, 13, 15, 17, 19: /mod_base = "2'-O-methyl corresponding base"
  modified_base 2, 4, 6, 8, 10, 12, 14, 16, 18: /mod_base = "2'-deoxy-2'-fluoro corresponding base"
  modified_base 21: /mod_base = "5'-thio thymidine"
aagcaaaacaggucuagaatt

SEQ ID NO: 1233 - DNA, 21 bp, Artificial sequence
  siRNAs to PCSK9
  modified_base 1, 2, 3, 4, 8, 9, 10, 12, 13, 14, 15, 17, 18, 19: /mod_base = "2'-deoxy-2'-fluoro corresponding base"
  modified_base 21: /mod_base = "5'-thio thymidine"
  modified_base 5, 6, 7, 11, 16: /mod_base = "2'-hydroxy corresponding base"
uucuagaccuguuuugcuutt

SEQ ID NO: 1234 - DNA, 21 bp, Artificial sequence
  siRNAs to PCSK9
  modified_base 4, 9, 13, 14, 15: /mod_base = "2'-deoxy-2'-fluoro corresponding base"
  modified_base 21: /mod_base = "5'-thio thymidine"
  modified_base 1, 2, 3, 5, 6, 7, 8, 10, 11, 12, 16, 17, 18, 19: /mod_base = "2'-hydroxy corresponding base"
aagcaaaacaggucuagaatt

SEQ ID NO: 1235 - DNA, 21 bp, Artificial sequence
  siRNAs to PCSK9
  modified_base 2, 4, 6, 8, 10, 12, 14, 16, 18: /mod_base = "2'-O-methyl corresponding base"
  modified_base 21: /mod_base = "5'-thio thymidine"
  modified_base 1, 3, 5, 7, 9, 11, 13, 15, 17, 19: /mod_base = "2'-hydroxy corresponding base"
uucuagaccuguuuugcuutt

SEQ ID NO: 1236 - DNA, 21 bp, Artificial sequence
  siRNAs to PCSK9
  modified_base 1, 3, 5, 7, 9, 11, 13, 15, 17, 19: /mod_base = "2'-O-methyl corresponding base"
  modified_base 2, 4, 6, 8, 10, 12, 14, 16, 18: /mod_base = "2'-deoxy-2'-fluoro corresponding base"
  modified_base 21: /mod_base = "5'-thio thymidine"
aagcaaaacaggucuagaatt

SEQ ID NO: 1237 - DNA, 21 bp, Artificial sequence
  siRNAs to PCSK9
  modified_base 2, 4, 6, 8, 10, 12, 14, 16, 18: /mod_base = "2'-O-methyl corresponding base"
  modified_base 21: /mod_base = "5'-thio thymidine"
  modified_base 1, 3, 5, 7, 9, 11, 13, 15, 17, 19: /mod_base = "2'-hydroxy corresponding base"
uucuagaccuguuuugcuutt

SEQ ID NO: 1238 - DNA, 21 bp, Artificial sequence
  siRNAs to PCSK9
  modified_base 4, 9, 13, 14, 15: /mod_base = "2'-deoxy-2'-fluoro corresponding base"
  modified_base 21: /mod_base = "5'-thio thymidine"
  modified_base 1, 2, 3, 5, 6, 7, 8, 10, 11, 12, 16, 17, 18, 19: /mod_base = "2'-hydroxy corresponding base"
aagcaaaacaggucuagaatt

SEQ ID NO: 1239 - DNA, 20 bp, Artificial sequence
  siRNAs to PCSK9
  modified_base 2, 4, 6, 8, 10, 12, 14, 18: /mod_base = "2'-O-methyl corresponding base"
  modified_base 1, 3, 5, 7, 9, 11, 13, 15, 17, 19: /mod_base = "2'-deoxy-2'-fluoro corresponding base"
  modified_base 21: /mod_base = "5'-thio thymidine"
uucuagaccuguuuucuutt

SEQ ID NO: 1240 - DNA, 21 bp, Artificial sequence
  siRNAs to PCSK9
  modified_base 4, 6, 7, 10, 11, 17, 18, 19: /mod_base = "2'-O-methyl corresponding base"
  modified_base 21: /mod_base = "5'-thio thymidine"
  modified_base 1, 2, 3, 5, 8, 9, 12, 13, 14, 15, 16: /mod_base = "2'-hydroxy corresponding base"
aagcaaaacaggucuagaatt

SEQ ID NO: 1241 - DNA, 21 bp, Artificial sequence
  siRNAs to PCSK9
  modified_base 1, 2, 3, 4, 8, 9, 10, 12, 13, 14, 15, 17, 18, 19: /mod_base = "2'-deoxy-2'-fluoro corresponding base"
  modified_base 21: /mod_base = "5'-thio thymidine"
  modified_base 5, 6, 7, 11, 16: /mod_base = "2'-hydroxy corresponding base"
uucuagaccuguuuugcuutt

SEQ ID NO: 1242 - DNA, 21 bp, Artificial sequence
  siRNAs to PCSK9
  modified_base 4, 6, 7, 10, 11, 17, 18, 19: /mod_base = "2'-O-methyl corresponding base"
  modified_base 21: /mod_base = "5'-thio thymidine"
  modified_base 1, 2, 3, 5, 8, 9, 12, 13, 14, 15, 16: /mod_base = "2'-hydroxy corresponding base"
aagcaaaacaggucuagaatt

SEQ ID NO: 1243 - DNA, 21 bp, Artificial sequence
  siRNAs to PCSK9
  modified_base 2, 4, 6, 8, 10, 12, 14, 16, 18: /mod_base = "2'-O-methyl corresponding base"
  modified_base 21: /mod_base = "5'-thio thymidine"
  modified_base 1, 3, 5, 7, 9, 11, 13, 15, 17, 19: /mod_base = "2'-hydroxy corresponding base"
uucuagaccuguuuugcuutt

SEQ ID NO: 1244 - DNA, 21 bp, Artificial sequence
  siRNAs to PCSK9
  modified_base 4, 6, 7, 10, 11, 17, 18, 19: /mod_base = "2'-O-methyl corresponding base"
  modified_base 21: /mod_base = "5'-thio thymidine"
  modified_base 1, 2, 3, 5, 8, 9, 12, 13, 14, 15, 16: /mod_base = "2'-hydroxy corresponding base"
aagcaaaacaggucuagaatt

SEQ ID NO: 1245 - DNA, 21 bp, Artificial sequence
  siRNAs to PCSK9
  modified_base 2, 4, 6, 8, 10, 12, 14, 16, 18: /mod_base = "2'-O-methyl corresponding base"
  modified_base 1, 3, 5, 7, 9, 11, 13, 15, 17, 19: /mod_base = "2'-deoxy-2'-fluoro corresponding base"
  modified_base 21: /mod_base = "5'-thio thymidine"
cauaggccuggaguuuauutt

SEQ ID NO: 1246 - DNA, 21 bp, Artificial sequence
  siRNAs to PCSK9
  modified_base 1, 3, 5, 7, 9, 11, 13, 15, 17, 19: /mod_base = "2'-O-methyl corresponding base"
  modified_base 2, 4, 6, 8, 10, 12, 14, 16, 18: /mod_base = "2'-deoxy-2'-fluoro corresponding base"
  modified_base 21: /mod_base = "5'-thio thymidine"
aauaaacuccaggccuaugtt

SEQ ID NO: 1247 - DNA, 21 bp, Artificial sequence
  siRNAs to PCSK9
  modified_base 1, 3, 7, 8, 9, 14, 15, 16, 18, 19: /mod_base = "2'-deoxy-2'-fluoro corresponding base"
  modified_base 21: /mod_base = "5'-thio thymidine"
  modified_base 2, 4, 5, 6, 10, 11, 12, 13, 17: /mod_base = "2'-hydroxy corresponding base"
cauaggccuggaguuuauutt

SEQ ID NO: 1248 - DNA, 21 bp, Artificial sequence
  siRNAs to PCSK9
  modified_base 3, 7, 8, 9, 10, 14, 15, 16, 18: /mod_base = "2'-deoxy-2'-fluoro corresponding base"
  modified_base 21: /mod_base = "5'-thio thymidine"
  modified_base 1, 2, 4, 5, 6, 11, 12, 13, 17, 19: /mod_base = "2'-hydroxy corresponding base"
aauaaacuccaggccuaugtt

SEQ ID NO: 1249 - DNA, 21 bp, Artificial sequence
  siRNAs to PCSK9
  modified_base 2, 4, 6, 8, 10, 12, 14, 16, 18: /mod_base = "2'-O-methyl corresponding base"
  modified_base 21: /mod_base = "5'-thio thymidine"
  modified_base 1, 3, 5, 7, 9, 11, 13, 15, 17, 19: /mod_base = "2'-hydroxy corresponding base"
cauaggccuggaguuuauutt

SEQ ID NO: 1250 - DNA, 21 bp, Artificial sequence
  siRNAs to PCSK9
  modified_base 1, 3, 5, 7, 9, 11, 13, 15, 17, 19: /mod_base = "2'-O-methyl corresponding base"
  modified_base 2, 4, 6, 8, 10, 12, 14, 16, 18: /mod_base = "2'-deoxy-2'-fluoro corresponding base"
  modified_base 21: /mod_base = "5'-thio thymidine"
aauaaacuccaggccuaugtt

SEQ ID NO: 1251 - DNA, 21 bp, Artificial sequence
  siRNAs to PCSK9
  modified_base 2, 4, 6, 8, 10, 12, 14, 16, 18: /mod_base = "2'-O-methyl corresponding base"
  modified_base 21: /mod_base = "5'-thio thymidine"
  modified_base 1, 3, 5, 7, 9, 11, 13, 15, 17, 19: /mod_base = "2'-hydroxy corresponding base"
cauaggccuggaguuuauutt

SEQ ID NO: 1252 - DNA, 21 bp, Artificial sequence
  siRNAs to PCSK9
  modified_base 3, 7, 8, 9, 10, 14, 15, 16, 18: /mod_base = "2'-deoxy-2'-fluoro corresponding base"
  modified_base 21: /mod_base = "5'-thio thymidine"
  modified_base 1, 2, 4, 5, 6, 11, 12, 13, 17, 19: /mod_base = "2'-hydroxy corresponding base"
aauaaacuccaggccuaugtt

SEQ ID NO: 1253 - DNA, 21 bp, Artificial sequence
  siRNAs to PCSK9
  modified_base 2, 4, 6, 8, 10, 12, 14, 16, 18: /mod_base = "2'-O-methyl corresponding base"
  modified_base 1, 3, 5, 7, 9, 11, 13, 15, 17, 19: /mod_base = "2'-deoxy-2'-fluoro corresponding base"
  modified_base 21: /mod_base = "5'-thio thymidine"
cauaggccuggaguuuauutt

SEQ ID NO: 1254 - DNA, 21 bp, Artificial sequence
  siRNAs to PCSK9
  modified_base 6, 7, 10, 11, 17, 18, 19: /mod_base = "2'-O-methyl corresponding base"
  modified_base 21: /mod_base = "5'-thio thymidine"
  modified_base 1, 2, 3, 4, 5, 8, 9, 12, 13, 14, 15, 16: /mod_base = "2'-hydroxy corresponding base"
aauaaacuccaggccuaugtt

SEQ ID NO: 1255 - DNA, 21 bp, Artificial sequence
  siRNAs to PCSK9
  modified_base 1, 3, 7, 8, 9, 14, 15, 16, 18, 19: /mod_base = "2'-deoxy-2'-fluoro corresponding base"
  modified_base 21: /mod_base = "5'-thio thymidine"
  modified_base 2, 4, 5, 6, 10, 11, 12, 13, 17: /mod_base = "2'-hydroxy corresponding base"
cauaggccuggaguuuauutt

SEQ ID NO: 1256 - DNA, 21 bp, Artificial sequence
  siRNAs to PCSK9
  modified_base 6, 7, 10, 11, 17, 18, 19: /mod_base = "2'-O-methyl corresponding base"
  modified_base 21: /mod_base = "5'-thio thymidine"
  modified_base 1, 2, 3, 4, 5, 8, 9, 12, 13, 14, 15, 16: /mod_base = "2'-hydroxy corresponding base"
aauaaacuccaggccuaugtt

SEQ ID NO: 1257 - DNA, 21 bp, Artificial sequence
  siRNAs to PCSK9
  modified_base 2, 4, 6, 8, 10, 12, 14, 16, 18: /mod_base = "2'-O-methyl corresponding base"
  modified_base 21: /mod_base = "5'-thio thymidine"
  modified_base 1, 3, 5, 7, 9, 11, 13, 15, 17, 19: /mod_base = "2'-hydroxy corresponding base"
cauaggccuggaguuuauutt

SEQ ID NO: 1258 - DNA, 21 bp, Artificial sequence
  siRNAs to PCSK9
  modified_base 6, 7, 10, 11, 17, 18, 19: /mod_base = "2'-O-methyl corresponding base"
  modified_base 21: /mod_base = "5'-thio thymidine"
  modified_base 1, 2, 3, 4, 5, 8, 9, 12, 13, 14, 15, 16: /mod_base = "2'-hydroxy corresponding base"
aauaaacuccaggccuaugtt

SEQ ID NO: 1259 - DNA, 21 bp, Artificial sequence
  siRNAs to PCSK9
  modified_base 21: /mod_base = "5'-thio thymidine"
  modified_base 1..19: /mod_base = "2'-hydroxy corresponding base"
ucuagaccuguuuugcuuutt

SEQ ID NO: 1260 - DNA, 21 bp, Artificial sequence
  siRNAs to PCSK9
  modified_base 21: /mod_base = "5'-thio thymidine"
  modified_base 1..19: /mod_base = "2'-hydroxy corresponding base"
aaagcaaaacaggucuagatt

SEQ ID NO: 1261 - DNA, 21 bp, Artificial sequence
  siRNAs to PCSK9
  modified_base 1, 2, 3, 7, 8, 9, 11, 12, 13, 14, 16, 17, 18, 19: /mod_base = "2'-O-methyl corresponding base"
  modified_base 21: /mod_base = "5'-thio thymidine"
  modified_base 4, 5, 6, 10, 15: /mod_base = "2'-hydroxy corresponding base"
ucuagaccuguuuugcuuutt

SEQ ID NO: 1262 - DNA, 21 bp, Artificial sequence
  siRNAs to PCSK9
  modified_base 5, 10, 16: /mod_base = "2'-O-methyl corresponding base"
  modified_base 21: /mod_base = "5'-thio thymidine"
  modified_base 1, 2, 3, 4, 6, 7, 8, 9, 11, 12, 13, 14, 15, 17, 18, 19: /mod_base = "2'-hydroxy corresponding base"
aaagcaaaacaggucuagatt

SEQ ID NO: 1263 - DNA, 21 bp, Artificial sequence
  siRNAs to PCSK9
  modified_base 2, 4, 6, 8, 10, 12, 14, 16, 18: /mod_base = "2'-O-methyl corresponding base"
  modified_base 1, 3, 5, 7, 9, 11, 13, 15, 17, 19: /mod_base = "2'-deoxy-2'-fluoro corresponding base"
  modified_base 21: /mod_base = "5'-thio thymidine"
ucuagaccuguuuugcuuutt

SEQ ID NO: 1264 - DNA, 21 bp, Artificial sequence
  siRNAs to PCSK9
  modified_base 1, 3, 5, 7, 9, 11, 13, 15, 17, 19: /mod_base = "2'-O-methyl corresponding base"
  modified_base 2, 4, 6, 8, 10, 12, 14, 16, 18: /mod_base = "2'-deoxy-2'-fluoro corresponding base"
  modified_base 21: /mod_base = "5'-thio thymidine"
aaagcaaaacaggucuagatt

SEQ ID NO: 1265 - DNA, 21 bp, Artificial sequence
  siRNAs to PCSK9
  modified_base 1, 2, 3, 7, 8, 9, 11, 12, 13, 14, 16, 17, 18, 19: /mod_base = "2'-deoxy-2'-fluoro corresponding base"
  modified_base 21: /mod_base = "5'-thio thymidine"
  modified_base 4, 5, 6, 10, 15: /mod_base = "2'-hydroxy corresponding base"
ucuagaccuguuuugcuuutt

SEQ ID NO: 1266 - DNA, 21 bp, Artificial sequence
  siRNAs to PCSK9
  modified_base 5, 10, 14, 15, 16: /mod_base = "2'-deoxy-2'-fluoro corresponding base"
  modified_base 21: /mod_base = "5'-thio thymidine"
  modified_base 1, 2, 3, 4, 6, 7, 8, 9, 11, 12, 13, 17, 18, 19: /mod_base = "2'-hydroxy corresponding base"
aaagcaaaacaggucuagatt

SEQ ID NO: 1267 - DNA, 21 bp, Artificial sequence
  siRNAs to PCSK9
  modified_base 2, 4, 6, 8, 10, 12, 14, 16, 18: /mod_base = "2'-O-methyl corresponding base"
  modified_base 21: /mod_base = "5'-thio thymidine"
  modified_base 1, 3, 5, 7, 9, 11, 13, 15, 17, 19: /mod_base = "2'-hydroxy corresponding base"
ucuagaccuguuuugcuuutt

SEQ ID NO: 1268 - DNA, 21 bp, Artificial sequence
  siRNAs to PCSK9
  modified_base 1, 3, 5, 7, 9, 11, 13, 15, 17, 19: /mod_base = "2'-O-methyl corresponding base"
  modified_base 2, 4, 6, 8, 10, 12, 14, 16, 18: /mod_base = "2'-deoxy-2'-fluoro corresponding base"
  modified_base 21: /mod_base = "5'-thio thymidine"
aaagcaaaacaggucuagatt

SEQ ID NO: 1269 - DNA, 21 bp, Artificial sequence
  siRNAs to PCSK9
  modified_base 2, 4, 6, 8, 10, 12, 14, 16, 18: /mod_base = "2'-O-methyl corresponding base"
  modified_base 21: /mod_base = "5'-thio thymidine"
  modified_base 1, 3, 5, 7, 9, 11, 13, 15, 17, 19: /mod_base = "2'-hydroxy corresponding base"
ucuagaccuguuuugcuuutt

SEQ ID NO: 1270 - DNA, 21 bp, Artificial sequence
  siRNAs to PCSK9
  modified_base 5, 10, 14, 15, 16: /mod_base = "2'-deoxy-2'-fluoro corresponding base"
  modified_base 21: /mod_base = "5'-thio thymidine"
  modified_base 1, 2, 3, 4, 6, 7, 8, 9, 11, 12, 13, 17, 18, 19: /mod_base = "2'-hydroxy corresponding base"
aaagcaaaacaggucuagatt

SEQ ID NO: 1271 - DNA, 21 bp, Artificial sequence
  siRNAs to PCSK9
  modified_base 2, 4, 6, 8, 10, 12, 14, 16, 18: /mod_base = "2'-O-methyl corresponding base"
  modified_base 1, 3, 5, 7, 9, 11, 13, 15, 17, 19: /mod_base = "2'-deoxy-2'-fluoro corresponding base"
  modified_base 21: /mod_base = "5'-thio thymidine"
ucuagaccuguuuugcuuutt

SEQ ID NO: 1272 - DNA, 21 bp, Artificial sequence
  siRNAs to PCSK9
  modified_base 6, 7, 10, 11, 17, 18, 19: /mod_base = "2'-O-methyl corresponding base"
  modified_base 21: /mod_base = "5'-thio thymidine"
  modified_base 1, 2, 3, 4, 5, 8, 9, 12, 13, 14, 15, 16: /mod_base = "2'-hydroxy corresponding base"
aaagcaaaacaggucuagatt

SEQ ID NO: 1273 - DNA, 21 bp, Artificial sequence
  siRNAs to PCSK9
  modified_base 1, 2, 3, 7, 8, 9, 11, 12, 13, 14, 16, 17, 18, 19: /mod_base = "2'-deoxy-2'-fluoro corresponding base"
  modified_base 21: /mod_base = "5'-thio thymidine"
  modified_base 4, 5, 6, 10, 15: /mod_base = "2'-hydroxy corresponding base"
ucuagaccuguuuugcuuutt

SEQ ID NO: 1274 - DNA, 21 bp, Artificial sequence
  siRNAs to PCSK9
  modified_base 6, 7, 10, 11, 17, 18, 19: /mod_base = "2'-O-methyl corresponding base"
  modified_base 21: /mod_base = "5'-thio thymidine"
  modified_base 1, 2, 3, 4, 5, 8, 9, 12, 13, 14, 15, 16: /mod_base = "2'-hydroxy corresponding base"
aaagcaaaacaggucuagatt

SEQ ID NO: 1275 - DNA, 21 bp, Artificial sequence
  siRNAs to PCSK9
  modified_base 2, 4, 6, 8, 10, 12, 14, 16, 18: /mod_base = "2'-O-methyl corresponding base"
  modified_base 21: /mod_base = "5'-thio thymidine"
  modified_base 1, 3, 5, 7, 9, 11, 13, 15, 17, 19: /mod_base = "2'-hydroxy corresponding base"
ucuagaccuguuuugcuuutt

SEQ ID NO: 1276 - DNA, 21 bp, Artificial sequence
  siRNAs to PCSK9
  modified_base 6, 7, 10, 11, 17, 18, 19: /mod_base = "2'-O-methyl corresponding base"
  modified_base 21: /mod_base = "5'-thio thymidine"
  modified_base 1, 2, 3, 4, 5, 8, 9, 12, 13, 14, 15, 16: /mod_base = "2'-hydroxy corresponding base"
aaagcaaaacaggucuagatt

SEQ ID NO: 1277 - DNA, 21 bp, Artificial sequence
  siRNAs to PCSK9
  modified_base 2, 4, 6, 8, 10, 12, 14, 16, 18: /mod_base = "2'-O-methyl corresponding base"
  modified_base 1, 3, 5, 7, 9, 11, 13, 15, 17, 19: /mod_base = "2'-deoxy-2'-fluoro corresponding base"
  modified_base 21: /mod_base = "5'-thio thymidine"
ucauaggccuggaguuuautt

SEQ ID NO: 1278 - DNA, 21 bp, Artificial sequence
  siRNAs to PCSK9
  modified_base 1, 3, 5, 7, 9, 11, 13, 15, 17, 19: /mod_base = "2'-O-methyl corresponding base"
  modified_base 2, 4, 6, 8, 10, 12, 14, 16, 18: /mod_base = "2'-deoxy-2'-fluoro corresponding base"
  modified_base 21: /mod_base = "5'-thio thymidine"
auaaacuccaggccuaugatt

SEQ ID NO: 1279 - DNA, 21 bp, Artificial sequence
  siRNAs to PCSK9
  modified_base 1, 2, 4, 8, 9, 10, 15, 16, 17, 19: /mod_base = "2'-deoxy-2'-fluoro corresponding base"
  modified_base 21: /mod_base = "5'-thio thymidine"
  modified_base 3, 5, 6, 7, 11, 12, 13, 14, 18: /mod_base = "2'-hydroxy corresponding base"
ucauaggccuggaguuuautt

SEQ ID NO: 1280 - DNA, 21 bp, Artificial sequence
  siRNAs to PCSK9
  modified_base 2, 6, 7, 8, 9, 13, 14, 15, 17: /mod_base = "2'-deoxy-2'-fluoro corresponding base"
  modified_base 21: /mod_base = "5'-thio thymidine"
  modified_base 1, 3, 4, 5, 10, 11, 12, 16, 18, 19: /mod_base = "2'-hydroxy corresponding base"
auaaacuccaggccuaugatt

SEQ ID NO: 1281 - DNA, 21 bp, Artificial sequence
  siRNAs to PCSK9
  modified_base 2, 4, 6, 8, 10, 12, 14, 16, 18: /mod_base = "2'-O-methyl corresponding base"
  modified_base 21: /mod_base = "5'-thio thymidine"
  modified_base 1, 3, 5, 7, 9, 11, 13, 15, 17, 19: /mod_base = "2'-hydroxy corresponding base"
ucauaggccuggaguuuautt

SEQ ID NO: 1282 - DNA, 21 bp, Artificial sequence
  siRNAs to PCSK9
  modified_base 1, 3, 5, 7, 9, 11, 13, 15, 17, 19: /mod_base = "2'-O-methyl corresponding base"
  modified_base 2, 4, 6, 8, 10, 12, 14, 16, 18: /mod_base = "2'-deoxy-2'-fluoro corresponding base"
  modified_base 21: /mod_base = "5'-thio thymidine"
auaaacuccaggccuaugatt

SEQ ID NO: 1283 - DNA, 21 bp, Artificial sequence
  siRNAs to PCSK9
  modified_base 2, 4, 6, 8, 10, 12, 14, 16, 18: /mod_base = "2'-O-methyl corresponding base"
  modified_base 21: /mod_base = "5'-thio thymidine"
  modified_base 1, 3, 5, 7, 9, 11, 13, 15, 17, 19: /mod_base = "2'-hydroxy corresponding base"
ucauaggccuggaguuuautt

SEQ ID NO: 1284 - DNA, 21 bp, Artificial sequence
  siRNAs to PCSK9
  modified_base 2, 6, 7, 8, 9, 13, 14, 15, 17: /mod_base = "2'-deoxy-2'-fluoro corresponding base"
  modified_base 21: /mod_base = "5'-thio thymidine"
  modified_base 1, 3, 4, 5, 10, 11, 12, 16, 18, 19: /mod_base = "2'-hydroxy corresponding base"
auaaacuccaggccuaugatt

SEQ ID NO: 1285 - DNA, 21 bp, Artificial sequence
  siRNAs to PCSK9
  modified_base 2, 4, 6, 8, 10, 12, 14, 16, 18: /mod_base = "2'-O-methyl corresponding base"
  modified_base 1, 3, 5, 7, 9, 11, 13, 15, 17, 19: /mod_base = "2'-deoxy-2'-fluoro corresponding base"
  modified_base 21: /mod_base = "5'-thio thymidine"
ucauaggccuggaguuuautt

SEQ ID NO: 1286 - DNA, 21 bp, Artificial sequence
  siRNAs to PCSK9
  modified_base 6, 7, 10, 11, 17, 18, 19: /mod_base = "2'-O-methyl corresponding base"
  modified_base 21: /mod_base = "5'-thio thymidine"
  modified_base 1, 2, 3, 4, 5, 8, 9, 12, 13, 14, 15, 16: /mod_base = "2'-hydroxy corresponding base"
auaaacuccaggccuaugatt

SEQ ID NO: 1287 - DNA, 21 bp, Artificial sequence
  siRNAs to PCSK9
  modified_base 1, 2, 4, 8, 9, 10, 15, 16, 17, 19: /mod_base = "2'-deoxy-2'-fluoro corresponding base"
  modified_base 21: /mod_base = "5'-thio thymidine"
  modified_base 3, 5, 6, 7, 11, 12, 13, 14, 18: /mod_base = "2'-hydroxy corresponding base"
ucauaggccuggaguuuautt

SEQ ID NO: 1288 - DNA, 21 bp, Artificial sequence
  siRNAs to PCSK9
  modified_base 6, 7, 10, 11, 17, 18, 19: /mod_base = "2'-O-methyl corresponding base"
  modified_base 21: /mod_base = "5'-thio thymidine"
  modified_base 1, 2, 3, 4, 5, 8, 9, 12, 13, 14, 15, 16: /mod_base = "2'-hydroxy corresponding base"
auaaacuccaggccuaugatt

SEQ ID NO: 1289 - DNA, 21 bp, Artificial sequence
  siRNAs to PCSK9
  modified_base 2, 4, 6, 8, 10, 12, 14, 16, 18: /mod_base = "2'-O-methyl corresponding base"
  modified_base 21: /mod_base = "5'-thio thymidine"
  modified_base 1, 3, 5, 7, 9, 11, 13, 15, 17, 19: /mod_base = "2'-hydroxy corresponding base"
ucauaggccuggaguuuautt

SEQ ID NO: 1290 - DNA, 21 bp, Artificial sequence
  siRNAs to PCSK9
  modified_base 6, 7, 10, 11, 17, 18, 19: /mod_base = "2'-O-methyl corresponding base"
  modified_base 21: /mod_base = "5'-thio thymidine"
  modified_base 1, 2, 3, 4, 5, 8, 9, 12, 13, 14, 15, 16: /mod_base = "2'-hydroxy corresponding base"
auaaacuccaggccuaugatt

SEQ ID NO: 1291 - DNA, 21 bp, Artificial sequence
  siRNAs to PCSK9
  modified_base 21: /mod_base = "5'-thio thymidine"
  modified_base 1..19: /mod_base = "2'-hydroxy corresponding base"
ugaagauauuuauucugggtt

SEQ ID NO: 1292 - DNA, 21 bp, Artificial sequence
  siRNAs to PCSK9
  modified_base 21: /mod_base = "5'-thio thymidine"
  modified_base 1..19: /mod_base = "2'-hydroxy corresponding base"
cccagaauaaauaucuucatt

SEQ ID NO: 1293 - DNA, 21 bp, Artificial sequence
  siRNAs to PCSK9
  modified_base 1, 7, 9, 10, 11, 13, 14, 15, 16: /mod_base = "2'-O-methyl corresponding base"
  modified_base 21: /mod_base = "5'-thio thymidine"
  modified_base 2, 3, 4, 5, 6, 8, 12, 17, 18, 19: /mod_base = "2'-hydroxy corresponding base"
ugaagauauuuauucugggtt

SEQ ID NO: 1294 - DNA, 21 bp, Artificial sequence
  siRNAs to PCSK9
  modified_base 3, 8, 12, 18: /mod_base = "2'-O-methyl corresponding base"
  modified_base 21: /mod_base = "5'-thio thymidine"
  modified_base 1, 2, 4, 5, 6, 7, 9, 10, 11, 13, 14, 15, 16, 17, 19: /mod_base = "2'-hydroxy corresponding base"
cccagaauaaauaucuucatt

SEQ ID NO: 1295 - DNA, 21 bp, Artificial sequence
  siRNAs to PCSK9
  modified_base 21: /mod_base = "5'-thio thymidine"
  modified_base 1..19: /mod_base = "2'-hydroxy corresponding base"
ucuggguuuuguagcauuutt

SEQ ID NO: 1296 - DNA, 21 bp, Artificial sequence
  siRNAs to PCSK9
  modified_base 21: /mod_base = "5'-thio thymidine"
  modified_base 1..19: /mod_base = "2'-hydroxy corresponding base"
aaaugcuacaaaacccagatt

SEQ ID NO: 1297 - DNA, 21 bp, Artificial sequence
  siRNAs to PCSK9
  modified_base 1, 2, 3, 7, 8, 9, 10, 12, 15, 17, 18, 19: /mod_base = "2'-O-methyl corresponding base"
  modified_base 21: /mod_base = "5'-thio thymidine"
  modified_base 4, 5, 6, 11, 13, 14, 16: /mod_base = "2'-hydroxy corresponding base"
ucuggguuuuguagcauuutt

SEQ ID NO: 1298 - DNA, 21 bp, Artificial sequence
  siRNAs to PCSK9
  modified_base 7, 9, 16: /mod_base = "2'-O-methyl corresponding base"
  modified_base 21: /mod_base = "5'-thio thymidine"
  modified_base 1, 2, 3, 4, 5, 6, 8, 10, 11, 12, 13, 14, 15, 17, 18, 19: /mod_base = "2'-hydroxy corresponding base"
aaaugcuacaaaacccagatt

SEQ ID NO: 1299 - DNA, 21 bp, Artificial sequence
  siRNAs to PCSK9
  modified_base 1..19: /mod_base = "2'-hydroxy corresponding base"
auaaaaacaaacaaacguutt

SEQ ID NO: 1300 - DNA, 21 bp, Artificial sequence
  siRNAs to PCSK9
  modified_base 1..19: /mod_base = "2'-hydroxy corresponding base"
aacguuuguuuguuuuuautt

SEQ ID NO: 1301 - DNA, 21 bp, Artificial sequence
  siRNAs to PCSK9
  modified_base 1..19: /mod_base = "2'-hydroxy corresponding base"
aaacaaacaaacguugucctt

SEQ ID NO: 1302 - DNA, 21 bp, Artificial sequence
  siRNAs to PCSK9
  modified_base 1..19: /mod_base = "2'-hydroxy corresponding base"
ggacaacguuuguuuguuutt

SEQ ID NO: 1303 - DNA, 21 bp, Artificial sequence
  siRNAs to PCSK9
  modified_base 1..19: /mod_base = "2'-hydroxy corresponding base"
aacaaacaaacguuguccutt

SEQ ID NO: 1304 - DNA, 21 bp, Artificial sequence
  siRNAs to PCSK9
  modified_base 1..19: /mod_base = "2'-hydroxy corresponding base"
aggacaacguuuguuuguutt

SEQ ID NO: 1305 - DNA, 21 bp, Artificial sequence
  siRNAs to PCSK9
  5'-terminal nucleic acid is a nucleoside, i.e. base + sugar but lacking 5'-phosphate
  modified_base 2, 3, 4, 9, 10, 11, 13, 14, 15: /mod_base = "2'-O-methyl corresponding base"
  modified_base 21: /mod_base = "5'-thio thymidine"
  modified_base 1, 5, 6, 7, 8, 12, 16, 17, 18, 19: /mod_base = "2'-hydroxy corresponding base"
gccuggaguuuauucggaatt

SEQ ID NO: 1306 - DNA, 21 bp, Artificial sequence
  siRNAs to PCSK9
  5'-terminal nucleic acid is a nucleoside, i.e. base + sugar but lacking 5'-phosphate
  modified_base 8, 15: /mod_base = "2'-O-methyl corresponding base"
  modified_base 21: /mod_base = "5'-thio thymidine"
  modified_base 1, 2, 3, 4, 5, 6, 7, 9, 10, 11, 12, 13, 14, 16, 17, 18, 19: /mod_base = "2'-hydroxy corresponding base"
uuccgaauaaacuccaggctt

SEQ ID NO: 1307 - DNA, 21 bp, Artificial sequence
  siRNAs to PCSK9
  5'-terminal nucleic acid is a nucleoside, i.e. base + sugar but lacking 5'-phosphate
  modified_base 2, 3, 4, 9, 10, 11, 13, 14, 15: /mod_base = "2'-O-methyl corresponding base"
  modified_base 21: /mod_base = "5'-thio thymidine"
  modified_base 1, 5, 6, 7, 8, 12, 16, 17, 18, 19: /mod_base = "2'-hydroxy corresponding base"
gccuggaguuuauucggaatt

SEQ ID NO: 1308 - DNA, 21 bp, Artificial sequence
  siRNAs to PCSK9
  5'-terminal nucleic acid is a nucleoside, i.e. base + sugar but lacking 5'-phosphate
  modified_base 1, 3, 8, 14, 15: /mod_base = "2'-O-methyl corresponding base"
  modified_base 21: /mod_base = "5'-thio thymidine"
  modified_base 2, 4, 5, 6, 7, 9, 10, 11, 12, 13, 16, 17, 18, 19: /mod_base = "2'-hydroxy corresponding base"
uuccgaauaaacuccaggctt

SEQ ID NO: 1309 - DNA, 21 bp, Artificial sequence
  siRNAs to PCSK9
  5'-terminal nucleic acid is a nucleoside, i.e. base + sugar but lacking 5'-phosphate
  modified_base 2, 3, 4, 9, 10, 11, 13, 14, 15: /mod_base = "2'-O-methyl corresponding base"
  modified_base 21: /mod_base = "5'-thio thymidine"
  modified_base 1, 5, 6, 7, 8, 12, 16, 17, 18, 19: /mod_base = "2'-hydroxy corresponding base"
gccuggaguuuauucggaatt

SEQ ID NO: 1310 - DNA, 21 bp, Artificial sequence
  siRNAs to PCSK9
  5'-terminal nucleic acid is a nucleoside, i.e. base + sugar but lacking 5'-phosphate
  modified_base 21: /mod_base = "5'-thio thymidine"
  modified_base 1..19: /mod_base = "2'-hydroxy corresponding base"
uuccgaauaaacuccaggctt

SEQ ID NO: 1311 - DNA, 21 bp, Artificial sequence
  siRNAs to PCSK9
  5'-terminal nucleic acid is a nucleoside, i.e. base + sugar but lacking 5'-phosphate
  modified_base 2, 3, 4, 9, 10, 11, 13, 14, 15: /mod_base = "2'-O-methyl corresponding base"
  modified_base 21: /mod_base = "5'-thio thymidine"
  modified_base 1, 5, 6, 7, 8, 12, 16, 17, 18, 19: /mod_base = "2'-hydroxy corresponding base"
gccuggaguuuauucggaatt

SEQ ID NO: 1312 - DNA, 21 bp, Artificial sequence
  siRNAs to PCSK9
  5'-terminal nucleic acid is a nucleoside, i.e. base + sugar but lacking 5'-phosphate
  modified_base 1: /mod_base = "2'-O-methyl corresponding base"
  modified_base 21: /mod_base = "5'-thio thymidine"
  modified_base 2..19: /mod_base = "2'-hydroxy corresponding base"
uuccgaauaaacuccaggctt

SEQ ID NO: 1313 - DNA, 21 bp, Artificial sequence
  siRNAs to PCSK9
  5'-terminal nucleic acid is a nucleoside, i.e. base + sugar but lacking 5'-phosphate
  modified_base 2, 3, 4, 9, 10, 11, 13, 14, 15: /mod_base = "2'-O-methyl corresponding base"
  modified_base 21: /mod_base = "5'-thio thymidine"
  modified_base 1, 5, 6, 7, 8, 12, 16, 17, 18, 19: /mod_base = "2'-hydroxy corresponding base"
gccuggaguuuauucggaatt

SEQ ID NO: 1314 - DNA, 21 bp, Artificial sequence
  siRNAs to PCSK9
  5'-terminal nucleic acid is a nucleoside, i.e. base + sugar but lacking 5'-phosphate
  modified_base 2: /mod_base = "2'-O-methyl corresponding base"
  modified_base 21: /mod_base = "5'-thio thymidine"
  modified_base 1, 3, 4, 5, 6, 7, 8, 9, 10, 11, 12, 13, 14, 15, 16, 17, 18, 19: /mod_base = "2'-hydroxy corresponding base"
uuccgaauaaacuccaggctt

SEQ ID NO: 1315 - DNA, 21 bp, Artificial sequence
  siRNAs to PCSK9
  5'-terminal nucleic acid is a nucleoside, i.e. base + sugar but lacking 5'-phosphate
  modified_base 2, 3, 4, 9, 10, 11, 13, 14, 15: /mod_base = "2'-O-methyl corresponding base"
  modified_base 21: /mod_base = "5'-thio thymidine"
  modified_base 1, 5, 6, 7, 8, 12, 16, 17, 18, 19: /mod_base = "2'-hydroxy corresponding base"
gccuggaguuuauucggaatt

SEQ ID NO: 1316 - DNA, 21 bp, Artificial sequence
  siRNAs to PCSK9
  5'-terminal nucleic acid is a nucleoside, i.e. base + sugar but lacking 5'-phosphate
  modified_base 3: /mod_base = "2'-O-methyl corresponding base"
  modified_base 21: /mod_base = "5'-thio thymidine"
  modified_base 1, 2, 4, 5, 6, 7, 8, 9, 10, 11, 12, 13, 14, 15, 16, 17, 18, 19: /mod_base = "2'-hydroxy corresponding base"
uuccgaauaaacuccaggctt

SEQ ID NO: 1317 - DNA, 21 bp, Artificial sequence
  siRNAs to PCSK9
  5'-terminal nucleic acid is a nucleoside, i.e. base + sugar but lacking 5'-phosphate
  modified_base 2, 3, 4, 9, 10, 11, 13, 14, 15: /mod_base = "2'-O-methyl corresponding base"
  modified_base 21: /mod_base = "5'-thio thymidine"
  modified_base 1, 5, 6, 7, 8, 12, 16, 17, 18, 19: /mod_base = "2'-hydroxy corresponding base"
gccuggaguuuauucggaatt

SEQ ID NO: 1318 - DNA, 21 bp, Artificial sequence
  siRNAs to PCSK9
  5'-terminal nucleic acid is a nucleoside, i.e. base + sugar but lacking 5'-phosphate
  modified_base 4: /mod_base = "2'-O-methyl corresponding base"
  modified_base 21: /mod_base = "5'-thio thymidine"
  modified_base 1, 2, 3, 5, 6, 7, 8, 9, 10, 11, 12, 13, 14, 15, 16, 17, 18, 19: /mod_base = "2'-hydroxy corresponding base"
uuccgaauaaacuccaggctt

SEQ ID NO: 1319 - DNA, 21 bp, Artificial sequence
  siRNAs to PCSK9
  5'-terminal nucleic acid is a nucleoside, i.e. base + sugar but lacking 5'-phosphate
  modified_base 21: /mod_base = "5'-thio thymidine"
  modified_base 1..19: /mod_base = "2'-hydroxy corresponding base"
gccuggaguuuauucggaatt

SEQ ID NO: 1320 - DNA, 21 bp, Artificial sequence
  siRNAs to PCSK9
  5'-terminal nucleic acid is a nucleoside, i.e. base + sugar but lacking 5'-phosphate
  modified_base 1: /mod_base = "2'-O-methyl corresponding base"
  modified_base 21: /mod_base = "5'-thio thymidine"
  modified_base 2..19: /mod_base = "2'-hydroxy corresponding base"
uuccgaauaaacuccaggctt

SEQ ID NO: 1321 - DNA, 21 bp, Artificial sequence
  siRNAs to PCSK9
  5'-terminal nucleic acid is a nucleoside, i.e. base + sugar but lacking 5'-phosphate
  modified_base 21: /mod_base = "5'-thio thymidine"
  modified_base 1..19: /mod_base = "2'-hydroxy corresponding base"
gccuggaguuuauucggaatt

SEQ ID NO: 1322 - DNA, 21 bp, Artificial sequence
  siRNAs to PCSK9
  5'-terminal nucleic acid is a nucleoside, i.e. base + sugar but lacking 5'-phosphate
  modified_base 2: /mod_base = "2'-O-methyl corresponding base"
  modified_base 21: /mod_base = "5'-thio thymidine"
  modified_base 1, 3, 4, 5, 6, 7, 8, 9, 10, 11, 12, 13, 14, 15, 16, 17, 18, 19: /mod_base = "2'-hydroxy corresponding base"
uuccgaauaaacuccaggctt

SEQ ID NO: 1323 - DNA, 21 bp, Artificial sequence
  siRNAs to PCSK9
  5'-terminal nucleic acid is a nucleoside, i.e. base + sugar but lacking 5'-phosphate
  modified_base 21: /mod_base = "5'-thio thymidine"
  modified_base 1..19: /mod_base = "2'-hydroxy corresponding base"
gccuggaguuuauucggaatt

SEQ ID NO: 1324 - DNA, 21 bp, Artificial sequence
  siRNAs to PCSK9
  5'-terminal nucleic acid is a nucleoside, i.e. base + sugar but lacking 5'-phosphate
  modified_base 3: /mod_base = "2'-O-methyl corresponding base"
  modified_base 21: /mod_base = "5'-thio thymidine"
  modified_base 1, 2, 4, 5, 6, 7, 8, 9, 10, 11, 12, 13, 14, 15, 16, 17, 18, 19: /mod_base = "2'-hydroxy corresponding base"
uuccgaauaaacuccaggctt

SEQ ID NO: 1325 - DNA, 21 bp, Artificial sequence
  siRNAs to PCSK9
  5'-terminal nucleic acid is a nucleoside, i.e. base + sugar but lacking 5'-phosphate
  modified_base 21: /mod_base = "5'-thio thymidine"
  modified_base 1..19: /mod_base = "2'-hydroxy corresponding base"
gccuggaguuuauucggaatt

SEQ ID NO: 1326 - DNA, 21 bp, Artificial sequence
  siRNAs to PCSK9
  5'-terminal nucleic acid is a nucleoside, i.e. base + sugar but lacking 5'-phosphate
  modified_base 4: /mod_base = "2'-O-methyl corresponding base"
  modified_base 21: /mod_base = "5'-thio thymidine"
  modified_base 1, 2, 3, 5, 6, 7, 8, 9, 10, 11, 12, 13, 14, 15, 16, 17, 18, 19: /mod_base = "2'-hydroxy corresponding base"
uuccgaauaaacuccaggctt

SEQ ID NO: 1327 - RNA, 19 nt, Artificial sequence
  siRNAs to PCSK9
  5'-terminal nucleic acid is a nucleoside, i.e. base + sugar but lacking 5'-phosphate
  modified_base 2, 3, 4, 9, 10, 11, 13, 14, 15: /mod_base = "2'-O-methyl corresponding base"
gccuggaguuuauucggaa

SEQ ID NO: 1328 - RNA, 21 nt, Artificial sequence
  siRNAs to PCSK9
  5'-terminal nucleic acid is a nucleoside, i.e. base + sugar but lacking 5'-phosphate
  modified_base 20, 21: /mod_base = "2'-O-methyl corresponding base 5'-monophosphorothioate"
uuccgaauaaacuccaggccu

SEQ ID NO: 1329 - RNA, 20 nt, Artificial sequence
  siRNAs to PCSK9
  5'-terminal nucleic acid is a nucleoside, i.e. base + sugar but lacking 5'-phosphate
  modified_base 2, 3, 4, 9, 10, 11, 13, 14, 15: /mod_base = "2'-O-methyl corresponding base"
gccuggaguuuauucggaaa

SEQ ID NO: 1330 - RNA, 22 nt, Artificial sequence
  siRNAs to PCSK9
  5'-terminal nucleic acid is a nucleoside, i.e. base + sugar but lacking 5'-phosphate
  modified_base 21, 22: /mod_base = "2'-O-methyl corresponding base 5'-monophosphorothioate"
uuuccgaauaaacuccaggccu

SEQ ID NO: 1331 - RNA, 21 nt, Artificial sequence
  siRNAs to PCSK9
  5'-terminal nucleic acid is a nucleoside, i.e. base + sugar but lacking 5'-phosphate
  modified_base 2, 3, 4, 9, 10, 11, 13, 14, 15: /mod_base = "2'-O-methyl corresponding base"
gccuggaguuuauucggaaaa

SEQ ID NO: 1332 - RNA, 23 nt, Artificial sequence
  siRNAs to PCSK9
  5'-terminal nucleic acid is a nucleoside, i.e. base + sugar but lacking 5'-phosphate
  modified_base 22, 23: /mod_base = "2'-O-methyl corresponding base 5'-monophosphorothioate"
uuuuccgaauaaacuccaggccu

SEQ ID NO: 1333 - RNA, 22 nt, Artificial sequence
  siRNAs to PCSK9
  5'-terminal nucleic acid is a nucleoside, i.e. base + sugar but lacking 5'-phosphate
  modified_base 2, 3, 4, 9, 10, 11, 13, 14, 15: /mod_base = "2'-O-methyl corresponding base"
gccuggaguuuauucggaaaag

SEQ ID NO: 1334 - RNA, 24 nt, Artificial sequence
  siRNAs to PCSK9
  5'-terminal nucleic acid is a nucleoside, i.e. base + sugar but lacking 5'-phosphate
  modified_base 23, 24: /mod_base = "2'-O-methyl corresponding base 5'-monophosphorothioate"
cuuuuccgaauaaacuccaggccu

SEQ ID NO: 1335 - DNA, 21 bp, Artificial sequence
  siRNAs to PCSK9
  5'-terminal nucleic acid is a nucleoside, i.e. base + sugar but lacking 5'-phosphate
  modified_base 2, 3, 4, 9, 10, 11, 13, 14, 15: /mod_base = "2'-O-methyl corresponding base"
  modified_base 21: /mod_base = "thymidine with 3'-abasic nucleotide"
  modified_base 1, 5, 6, 7, 8, 12, 16, 17, 18, 19: /mod_base = "2'-hydroxy corresponding base"
gccuggaguuuauucggaatt

SEQ ID NO: 1336 - DNA, 21 bp, Artificial sequence
  siRNAs to PCSK9
  5'-terminal nucleic acid is a nucleoside, i.e. base + sugar but lacking 5'-phosphate
  modified_base 22: /mod_base = "2'-O-methyl corresponding base"
  modified_base 1..19: /mod_base = "2'-hydroxy corresponding base"
uuccgaauaaacuccaggctt

SEQ ID NO: 1337 - DNA, 22 bp, Artificial sequence
  siRNAs to PCSK9
  5'-terminal nucleic acid is a nucleoside, i.e. base + sugar but lacking 5'-phosphate
  modified_base 2, 3, 4, 9, 10, 11, 13, 14, 15: /mod_base = "2'-O-methyl corresponding base"
  modified_base 22: /mod_base = "thymidine with 3'-abasic nucleotide"
  modified_base 1, 5, 6, 7, 8, 12, 16, 17, 18, 19, 20: /mod_base = "2'-hydroxy corresponding base"
gccuggaguuuauucggaaatt

SEQ ID NO: 1338 - DNA, 22 bp, Artificial sequence
  siRNAs to PCSK9
  5'-terminal nucleic acid is a nucleoside, i.e. base + sugar but lacking 5'-phosphate
  modified_base 9, 23: /mod_base = "2'-O-methyl corresponding base"
  modified_base 1, 2, 3, 4, 5, 6, 7, 8, 10, 11, 12, 13, 14, 15, 16, 17, 18, 19, 20: /mod_base = "2'-hydroxy corresponding base"
uuuccgaauaaacuccaggctt

SEQ ID NO: 1339 - DNA, 23 bp, Artificial sequence
  siRNAs to PCSK9
  5'-terminal nucleic acid is a nucleoside, i.e. base + sugar but lacking 5'-phosphate
  modified_base 2, 3, 4, 9, 10, 11, 13, 14, 15: /mod_base = "2'-O-methyl corresponding base"
  modified_base 23: /mod_base = "thymidine with 3'-abasic nucleotide"
  modified_base 1, 5, 6, 7, 8, 12, 16, 17, 18, 19, 20, 21: /mod_base = "2'-hydroxy corresponding base"
gccuggaguuuauucggaaaatt

SEQ ID NO: 1340 - DNA, 23 bp, Artificial sequence
  siRNAs to PCSK9
  5'-terminal nucleic acid is a nucleoside, i.e. base + sugar but lacking 5'-phosphate
  modified_base 24: /mod_base = "2'-O-methyl corresponding base"
  modified_base 1..21: /mod_base = "2'-hydroxy corresponding base"
uuuuccgaauaaacuccaggctt

SEQ ID NO: 1341 - DNA, 24 bp, Artificial sequence
  siRNAs to PCSK9
  5'-terminal nucleic acid is a nucleoside, i.e. base + sugar but lacking 5'-phosphate
  modified_base 2, 3, 4, 9, 10, 11, 13, 14, 15: /mod_base = "2'-O-methyl corresponding base"
  modified_base 24: /mod_base = "thymidine with 3'-abasic nucleotide"
  modified_base 1, 5, 6, 7, 8, 12, 16, 17, 18, 19, 20, 21, 22: /mod_base = "2'-hydroxy corresponding base"
gccuggaguuuauucggaaaagtt

SEQ ID NO: 1342 - DNA, 24 bp, Artificial sequence
  siRNAs to PCSK9
  5'-terminal nucleic acid is a nucleoside, i.e. base + sugar but lacking 5'-phosphate
  modified_base 25: /mod_base = "2'-O-methyl corresponding base"
  modified_base 1..22: /mod_base = "2'-hydroxy corresponding base"
cuuuuccgaauaaacuccaggctt

SEQ ID NO: 1343 - DNA, 21 bp, Artificial sequence
  siRNAs to PCSK9
  5'-terminal nucleic acid is a nucleoside, i.e. base + sugar but lacking 5'-phosphate
  modified_base 21: /mod_base = "5'-thio thymidine"
  modified_base 1..19: /mod_base = "2'-hydroxy corresponding base"
gccuggaguuuauucggaatt

SEQ ID NO: 1344 - RNA, 21 nt, Artificial sequence
  siRNAs to PCSK9
  5'-terminal nucleic acid is a nucleoside, i.e. base + sugar but lacking 5'-phosphate
  modified_base 20, 21: /mod_base = "2'-O-methyl corresponding base 5'-monophosphorothioate"
uuccgaauaaacuccaggccu

SEQ ID NO: 1345 - DNA, 21 bp, Artificial sequence
  siRNAs to PCSK9
  5'-terminal nucleic acid is a nucleoside, i.e. base + sugar but lacking 5'-phosphate
  modified_base 2, 3, 4, 9, 10, 11, 13, 14, 15: /mod_base = "2'-O-methyl corresponding base"
  modified_base 21: /mod_base = "5'-thio thymidine"
  modified_base 1, 5, 6, 7, 8, 12, 16, 17, 18, 19: /mod_base = "2'-hydroxy corresponding base"
gccuggaguuuauucggaatt

SEQ ID NO: 1346 - RNA, 21 nt, Artificial sequence
  siRNAs to PCSK9
  5'-terminal nucleic acid is a nucleoside, i.e. base + sugar but lacking 5'-phosphate
  modified_base 20, 21: /mod_base = "2'-O-methyl corresponding base 5'-monophosphorothioate"
uuccgaauaaacuccaggccu

SEQ ID NO: 1347 - RNA, 19 nt, Artificial sequence
  siRNAs to PCSK9
  5'-terminal nucleic acid is a nucleoside, i.e. base + sugar but lacking 5'-phosphate
  modified_base 2, 4, 6, 8, 10, 12, 14, 16, 18: /mod_base = "2'-O-methyl corresponding base"
gccuggaguuuauucggaa

SEQ ID NO: 1348 - DNA, 21 bp, Artificial sequence
  siRNAs to PCSK9
  5'-terminal nucleic acid is a nucleoside, i.e. base + sugar but lacking 5'-phosphate
  modified_base 22: /mod_base = "2'-O-methyl corresponding base"
  modified_base 1..19: /mod_base = "2'-hydroxy corresponding base"
uuccgaauaaacuccaggctt

SEQ ID NO: 1349 - RNA, 19 nt, Artificial sequence
  siRNAs to PCSK9
  5'-terminal nucleic acid is a nucleoside, i.e. base + sugar but lacking 5'-phosphate
  modified_base 2, 4, 6, 8, 10, 12, 14, 16, 18: /mod_base = "2'-O-methyl corresponding base"
gccuggaguuuauucggaa

SEQ ID NO: 1350 - DNA, 21 bp, Artificial sequence
  siRNAs to PCSK9
  5'-terminal nucleic acid is a nucleoside, i.e. base + sugar but lacking 5'-phosphate
  modified_base 21: /mod_base = "5'-thio thymidine"
  modified_base 1..19: /mod_base = "2'-hydroxy corresponding base"
uuccgaauaaacuccaggctt

SEQ ID NO: 1351 - RNA, 19 nt, Artificial sequence
  siRNAs to PCSK9
  5'-terminal nucleic acid is a nucleoside, i.e. base + sugar but lacking 5'-phosphate
  modified_base 2, 4, 6, 8, 10, 12, 14, 16, 18: /mod_base = "2'-O-methyl corresponding base"
gccuggaguuuauucggaa

SEQ ID NO: 1352 - DNA, 21 bp, Artificial sequence
  siRNAs to PCSK9
  5'-terminal nucleic acid is a nucleoside, i.e. base + sugar but lacking 5'-phosphate
  modified_base 8, 15: /mod_base = "2'-O-methyl corresponding base"
  modified_base 21: /mod_base = "5'-thio thymidine"
  modified_base 1, 2, 3, 4, 5, 6, 7, 9, 10, 11, 12, 13, 14, 16, 17, 18, 19: /mod_base = "2'-hydroxy corresponding base"
uuccgaauaaacuccaggctt

SEQ ID NO: 1353 - RNA, 19 nt, Artificial sequence
  siRNAs to PCSK9
  5'-terminal nucleic acid is a nucleoside, i.e. base + sugar but lacking 5'-phosphate
  modified_base 2, 4, 6, 8, 10, 12, 14, 16, 18: /mod_base = "2'-O-methyl corresponding base"
gccuggaguuuauucggaa

SEQ ID NO: 1354 - DNA, 21 bp, Artificial sequence
  siRNAs to PCSK9
  5'-terminal nucleic acid is a nucleoside, i.e. base + sugar but lacking 5'-phosphate
  modified_base 1, 3, 8, 14, 15: /mod_base = "2'-O-methyl corresponding base"
  modified_base 21: /mod_base = "5'-thio thymidine"
  modified_base 2, 4, 5, 6, 7, 9, 10, 11, 12, 13, 16, 17, 18, 19: /mod_base = "2'-hydroxy corresponding base"
uuccgaauaaacuccaggctt

SEQ ID NO: 1355 - RNA, 19 nt, Artificial sequence
  siRNAs to PCSK9
  5'-terminal nucleic acid is a nucleoside, i.e. base + sugar but lacking 5'-phosphate
  modified_base 2, 4, 6, 8, 10, 12, 14, 16, 18: /mod_base = "2'-O-methyl corresponding base"
gccuggaguuuauucggaa

SEQ ID NO: 1356 - RNA, 19 nt, Artificial sequence
  siRNAs to PCSK9
  5'-terminal nucleic acid is a nucleoside, i.e. base + sugar but lacking 5'-phosphate
  modified_base 6, 7, 10, 11, 17, 18, 19: /mod_base = "2'-O-methyl corresponding base"
uuccgaauaaacuccaggc

SEQ ID NO: 1357 - DNA, 21 bp, Artificial sequence
  siRNAs to PCSK9
  5'-terminal nucleic acid is a nucleoside, i.e. base + sugar but lacking 5'-phosphate
  modified_base 2, 4, 6, 9, 11, 13, 15, 17, 19: /mod_base = "2'-O-methyl corresponding base"
  modified_base 22: /mod_base = "5'-thio thymidine"
  modified_base 1, 3, 5, 8, 10, 12, 14, 16, 18, 20: /mod_base = "2'-hydroxy corresponding base"
gccuggaguuuauucggaatt

SEQ ID NO: 1358 - DNA, 21 bp, Artificial sequence
  siRNAs to PCSK9
  5'-terminal nucleic acid is a nucleoside, i.e. base + sugar but lacking 5'-phosphate
  modified_base 6, 7, 10, 11, 17, 18, 19: /mod_base = "2'-O-methyl corresponding base"
  modified_base 21: /mod_base = "5'-thio thymidine"
  modified_base 1, 2, 3, 4, 5, 8, 9, 12, 13, 14, 15, 16: /mod_base = "2'-hydroxy corresponding base"
uuccgaauaaacuccaggctt

SEQ ID NO: 1359 - DNA, 21 bp, Artificial sequence
  siRNAs to PCSK9
  5'-terminal nucleic acid is a nucleoside, i.e. base + sugar but lacking 5'-phosphate
  modified_base 2, 4, 6, 8, 10, 12, 14, 16, 18: /mod_base = "2'-O-methyl corresponding base"
  modified_base 21: /mod_base = "thymidine with 3'-abasic nucleotide"
  modified_base 1, 3, 5, 7, 9, 11, 13, 15, 17, 19: /mod_base = "2'-hydroxy corresponding base"
gccuggaguuuauucggaatt

SEQ ID NO: 1360 - DNA, 21 bp, Artificial sequence
  siRNAs to PCSK9
  5'-terminal nucleic acid is a nucleoside, i.e. base + sugar but lacking 5'-phosphate
  modified_base 6, 7, 10, 11, 17, 18, 19, 22: /mod_base = "2'-O-methyl corresponding base"
  modified_base 1, 2, 3, 4, 5, 8, 9, 12, 13, 14, 15, 16: /mod_base = "2'-hydroxy corresponding base"
uuccgaauaaacuccaggctt

SEQ ID NO: 1361 - RNA, 19 nt, Artificial sequence
  siRNAs to PCSK9
  5'-terminal nucleic acid is a nucleoside, i.e. base + sugar but lacking 5'-phosphate
  modified_base 2, 4, 6, 8, 10, 12, 14, 16, 18: /mod_base = "2'-O-methyl corresponding base"
gccuggaguuuauucggaa

SEQ ID NO: 1362 - RNA, 21 nt, Artificial sequence
  siRNAs to PCSK9
  5'-terminal nucleic acid is a nucleoside, i.e. base + sugar but lacking 5'-phosphate
  modified_base 6, 7, 10, 11, 17, 18, 19: /mod_base = "2'-O-methyl corresponding base"
  modified_base 20, 21: /mod_base = "2'-O-methyl corresponding base 5'-monophosphorothioate"
uuccgaauaaacuccaggccu

SEQ ID NO: 1363 - DNA, 21 bp, Artificial sequence
  siRNAs to PCSK9
  5'-terminal nucleic acid is a nucleoside, i.e. base + sugar but lacking 5'-phosphate
  modified_base 2, 4, 6, 9, 11, 13, 15, 17, 19: /mod_base = "2'-O-methyl corresponding base"
  modified_base 22: /mod_base = "5'-thio thymidine"
  modified_base 1, 3, 5, 8, 10, 12, 14, 16, 18, 20: /mod_base = "2'-hydroxy corresponding base"
gccuggaguuuauucggaatt

SEQ ID NO: 1364 - DNA, 21 bp, Artificial sequence
  siRNAs to PCSK9
  5'-terminal nucleic acid is a nucleoside, i.e. base + sugar but lacking 5'-phosphate
  modified_base 8, 15: /mod_base = "2'-O-methyl corresponding base"
  modified_base 21: /mod_base = "5'-thio thymidine"
  modified_base 1, 2, 3, 4, 5, 6, 7, 9, 10, 11, 12, 13, 14, 16, 17, 18, 19: /mod_base = "2'-hydroxy corresponding base"
uuccgaauaaacuccaggctt

SEQ ID NO: 1365 - DNA, 21 bp, Artificial sequence
  siRNAs to PCSK9
  5'-terminal nucleic acid is a nucleoside, i.e. base + sugar but lacking 5'-phosphate
  modified_base 2, 4, 6, 8, 10, 12, 14, 16, 18: /mod_base = "2'-O-methyl corresponding base"
  modified_base 21: /mod_base = "thymidine with 3'-abasic nucleotide"
  modified_base 1, 3, 5, 7, 9, 11, 13, 15, 17, 19: /mod_base = "2'-hydroxy corresponding base"
gccuggaguuuauucggaatt

SEQ ID NO: 1366 - DNA, 21 bp, Artificial sequence
  siRNAs to PCSK9
  5'-terminal nucleic acid is a nucleoside, i.e. base + sugar but lacking 5'-phosphate
  modified_base 8, 15, 22: /mod_base = "2'-O-methyl corresponding base"
  modified_base 1, 2, 3, 4, 5, 6, 7, 9, 10, 11, 12, 13, 14, 16, 17, 18, 19: /mod_base = "2'-hydroxy corresponding base"
uuccgaauaaacuccaggctt

SEQ ID NO: 1367 - RNA, 19 nt, Artificial sequence
  siRNAs to PCSK9
  5'-terminal nucleic acid is a nucleoside, i.e. base + sugar but lacking 5'-phosphate
  modified_base 2, 4, 6, 8, 10, 12, 14, 16, 18: /mod_base = "2'-O-methyl corresponding base"
gccuggaguuuauucggaa

SEQ ID NO: 1368 - RNA, 21 nt, Artificial sequence
  siRNAs to PCSK9
  5'-terminal nucleic acid is a nucleoside, i.e. base + sugar but lacking 5'-phosphate
  modified_base 8, 15: /mod_base = "2'-O-methyl corresponding base"
  modified_base 20, 21: /mod_base = "2'-O-methyl corresponding base 5'-monophosphorothioate"
uuccgaauaaacuccaggccu

SEQ ID NO: 1369 - DNA, 21 bp, Artificial sequence
  siRNAs to PCSK9
  5'-terminal nucleic acid is a nucleoside, i.e. base + sugar but lacking 5'-phosphate
  modified_base 2, 4, 6, 9, 11, 13, 15, 17, 19: /mod_base = "2'-O-methyl corresponding base"
  modified_base 22: /mod_base = "5'-thio thymidine"
  modified_base 1, 3, 5, 8, 10, 12, 14, 16, 18, 20: /mod_base = "2'-hydroxy corresponding base"
gccuggaguuuauucggaatt

SEQ ID NO: 1370 - DNA, 21 bp, Artificial sequence
  siRNAs to PCSK9
  5'-terminal nucleic acid is a nucleoside, i.e. base + sugar but lacking 5'-phosphate
  modified_base 21: /mod_base = "5'-thio thymidine"
  modified_base 1..19: /mod_base = "2'-hydroxy corresponding base"
uuccgaauaaacuccaggctt

SEQ ID NO: 1371 - DNA, 21 bp, Artificial sequence
  siRNAs to PCSK9
  5'-terminal nucleic acid is a nucleoside, i.e. base + sugar but lacking 5'-phosphate
  modified_base 2, 4, 6, 8, 10, 12, 14, 16, 18: /mod_base = "2'-O-methyl corresponding base"
  modified_base 21: /mod_base = "thymidine with 3'-abasic nucleotide"
  modified_base 1, 3, 5, 7, 9, 11, 13, 15, 17, 19: /mod_base = "2'-hydroxy corresponding base"
gccuggaguuuauucggaatt

SEQ ID NO: 1372 - DNA, 21 bp, Artificial sequence
  siRNAs to PCSK9
  5'-terminal nucleic acid is a nucleoside, i.e. base + sugar but lacking 5'-phosphate
  modified_base 22: /mod_base = "2'-O-methyl corresponding base"
  modified_base 1..19: /mod_base = "2'-hydroxy corresponding base"
uuccgaauaaacuccaggctt

SEQ ID NO: 1373 - RNA, 19 nt, Artificial sequence
  siRNAs to PCSK9
  5'-terminal nucleic acid is a nucleoside, i.e. base + sugar but lacking 5'-phosphate
  modified_base 2, 4, 6, 8, 10, 12, 14, 16, 18: /mod_base = "2'-O-methyl corresponding base"
gccuggaguuuauucggaa

SEQ ID NO: 1374 - RNA, 21 nt, Artificial sequence
  siRNAs to PCSK9
  5'-terminal nucleic acid is a nucleoside, i.e. base + sugar but lacking 5'-phosphate
  modified_base 20, 21: /mod_base = "2'-O-methyl corresponding base 5'-monophosphorothioate"
uuccgaauaaacuccaggccu

SEQ ID NO: 1375 - RNA, 19 nt, Artificial sequence
  siRNAs to PCSK9
  5'-terminal nucleic acid is a nucleoside, i.e. base + sugar but lacking 5'-phosphate
  modified_base 2, 4, 6, 8, 10, 12, 14, 16, 18: /mod_base = "2'-O-methyl corresponding base"
  modified_base 1, 3, 5, 7, 9, 11, 13, 15, 17, 19: /mod_base = "2'-deoxy-2'-fluoro corresponding base"
gccuggaguuuauucggaa

SEQ ID NO: 1376 - RNA, 19 nt, Artificial sequence
  siRNAs to PCSK9
  modified_base 1, 3, 5, 7, 9, 11, 13, 15, 17, 19: /mod_base = "2'-O-methyl corresponding base"
  modified_base 2, 4, 6, 8, 10, 12, 14, 16, 18: /mod_base = "2'-deoxy-2'-fluoro corresponding base"
uuccgaauaaacuccaggc

SEQ ID NO: 1377 - RNA, 19 nt, Artificial sequence
  siRNAs to PCSK9
  modified_base 2, 4, 6, 8, 10, 12, 14, 16, 18: /mod_base = "2'-O-methyl corresponding base"
gccuggaguuuauucggaa

SEQ ID NO: 1378 - RNA, 19 nt, Artificial sequence
  siRNAs to PCSK9
  modified_base 1, 3, 5, 7, 9, 11, 13, 15, 17, 19: /mod_base = "2'-O-methyl corresponding base"
  modified_base 2, 4, 6, 8, 10, 12, 14, 16, 18: /mod_base = "2'-deoxy-2'-fluoro corresponding base"
uuccgaauaaacuccaggc

SEQ ID NO: 1379 - RNA, 19 nt, Artificial sequence
  siRNAs to PCSK9
  modified_base 2, 3, 4, 9, 10, 11, 13, 14, 15: /mod_base = "2'-O-methyl corresponding base"
gccuggaguuuauucggaa

SEQ ID NO: 1380 - RNA, 19 nt, Artificial sequence
  siRNAs to PCSK9
  modified_base 1, 3, 5, 7, 9, 11, 13, 15, 17, 19: /mod_base = "2'-O-methyl corresponding base"
  modified_base 2, 4, 6, 8, 10, 12, 14, 16, 18: /mod_base = "2'-deoxy-2'-fluoro corresponding base"
uuccgaauaaacuccaggc

SEQ ID NO: 1381 - DNA, 21 bp, Artificial sequence
  siRNAs to PCSK9
  modified_base 2, 4, 6, 8, 10, 12, 14, 16, 18: /mod_base = "2'-O-methyl corresponding base"
  modified_base 1, 3, 5, 7, 9, 11, 13, 15, 17, 19: /mod_base = "2'-deoxy-2'-fluoro corresponding base"
  modified_base 21: /mod_base = "5'-thio thymidine"
gccuggaguuuauucggaatt

SEQ ID NO: 1382 - DNA, 21 bp, Artificial sequence
  siRNAs to PCSK9
  modified_base 1, 3, 5, 7, 9, 11, 13, 15, 17, 19: /mod_base = "2'-O-methyl corresponding base"
  modified_base 2, 4, 6, 8, 10, 12, 14, 16, 18: /mod_base = "2'-deoxy-2'-fluoro corresponding base"
  modified_base 21: /mod_base = "5'-thio thymidine"
uuccgaauaaacuccaggctt

SEQ ID NO: 1383 - DNA, 21 bp, Artificial sequence
  siRNAs to PCSK9
  modified_base 2, 4, 6, 8, 10, 12, 14, 16, 18: /mod_base = "2'-O-methyl corresponding base"
  modified_base 1, 3, 5, 7, 9, 11, 13, 15, 17, 19: /mod_base = "2'-deoxy-2'-fluoro corresponding base"
  modified_base 21: /mod_base = "5'-thio thymidine"
gccuggaguuuauucggaatt

SEQ ID NO: 1384 - DNA, 21 bp, Artificial sequence
  siRNAs to PCSK9
  modified_base 8, 15: /mod_base = "2'-O-methyl corresponding base"
  modified_base 21: /mod_base = "5'-thio thymidine"
  modified_base 1, 2, 3, 4, 5, 6, 7, 9, 10, 11, 12, 13, 14, 16, 17, 18, 19: /mod_base = "2'-hydroxy corresponding base"
uuccgaauaaacuccaggctt

SEQ ID NO: 1385 - DNA, 21 bp, Artificial sequence
  siRNAs to PCSK9
  modified_base 2, 4, 6, 8, 10, 12, 14, 16, 18: /mod_base = "2'-O-methyl corresponding base"
  modified_base 1, 3, 5, 7, 9, 11, 13, 15, 17, 19: /mod_base = "2'-deoxy-2'-fluoro corresponding base"
  modified_base 21: /mod_base = "5'-thio thymidine"
gccuggaguuuauucggaatt

SEQ ID NO: 1386 - DNA, 21 bp, Artificial sequence
  siRNAs to PCSK9
  modified_base 1, 3, 8, 14, 15: /mod_base = "2'-O-methyl corresponding base"
  modified_base 21: /mod_base = "5'-thio thymidine"
  modified_base 2, 4, 5, 6, 7, 9, 10, 11, 12, 13, 16, 17, 18, 19: /mod_base = "2'-hydroxy corresponding base"
uuccgaauaaacuccaggctt

SEQ ID NO: 1387 - DNA, 21 bp, Artificial sequence
  siRNAs to PCSK9
  modified_base 2, 4, 6, 8, 10, 12, 14, 16, 18: /mod_base = "2'-O-methyl corresponding base"
  modified_base 1, 3, 5, 7, 9, 11, 13, 15, 17, 19: /mod_base = "2'-deoxy-2'-fluoro corresponding base"
  modified_base 21: /mod_base = "5'-thio thymidine"
gccuggaguuuauucggaatt

SEQ ID NO: 1388 - DNA, 21 bp, Artificial sequence
  siRNAs to PCSK9
  modified_base 21: /mod_base = "5'-thio thymidine"
  modified_base 1..19: /mod_base = "2'-hydroxy corresponding base"
uuccgaauaaacuccaggctt

SEQ ID NO: 1389 - DNA, 21 bp, Artificial sequence
  siRNAs to PCSK9
  modified_base 2, 4, 6, 8, 10, 12, 14, 16, 18: /mod_base = "2'-O-methyl corresponding base"
  modified_base 1, 3, 5, 7, 9, 11, 13, 15, 17, 19: /mod_base = "2'-deoxy-2'-fluoro corresponding base"
  modified_base 21: /mod_base = "5'-thio thymidine"
gccuggaguuuauucggaatt

SEQ ID NO: 1390 - RNA, 21 nt, Artificial sequence
  siRNAs to PCSK9
  modified_base 20, 21: /mod_base = "2'-O-methyl corresponding base 5'-monophosphorothioate"
uuccgaauaaacuccaggccu

SEQ ID NO: 1391 - DNA, 21 bp, Artificial sequence
  siRNAs to PCSK9
  modified_base 2, 4, 6, 8, 10, 12, 14, 16, 18: /mod_base = "2'-O-methyl corresponding base"
  modified_base 1, 3, 5, 7, 9, 11, 13, 15, 17, 19: /mod_base = "2'-deoxy-2'-fluoro corresponding base"
  modified_base 21: /mod_base = "5'-thio thymidine"
gccuggaguuuauucggaatt

SEQ ID NO: 1392 - RNA, 21 nt, Artificial sequence
  siRNAs to PCSK9
  modified_base 6, 7, 10, 11, 17, 18, 19: /mod_base = "2'-O-methyl corresponding base"
  modified_base 20, 21: /mod_base = "2'-O-methyl corresponding base 5'-monophosphorothioate"
uuccgaauaaacuccaggccu

SEQ ID NO: 1393 - DNA, 21 bp, Artificial sequence
  siRNAs to PCSK9
  modified_base 21: /mod_base = "5'-thio thymidine"
  modified_base 1..19: /mod_base = "2'-hydroxy corresponding base"
gccuggaguuuauucggaatt

SEQ ID NO: 1394 - DNA, 21 bp, Artificial sequence
  siRNAs to PCSK9
  modified_base 1, 3, 5, 7, 9, 11, 13, 15, 17, 19: /mod_base = "2'-O-methyl corresponding base"
  modified_base 2, 4, 6, 8, 10, 12, 14, 16, 18: /mod_base = "2'-deoxy-2'-fluoro corresponding base"
  modified_base 21: /mod_base = "5'-thio thymidine"
uuccgaauaaacuccaggctt

SEQ ID NO: 1395 - DNA, 21 bp, Artificial sequence
  siRNAs to PCSK9
  modified_base 2, 3, 4, 9, 10, 11, 13, 14, 15: /mod_base = "2'-O-methyl corresponding base"
  modified_base 21: /mod_base = "5'-thio thymidine"
  modified_base 1, 5, 6, 7, 8, 12, 16, 17, 18, 19: /mod_base = "2'-hydroxy corresponding base"
gccuggaguuuauucggaatt

SEQ ID NO: 1396 - DNA, 21 bp, Artificial sequence
  siRNAs to PCSK9
  modified_base 1, 3, 5, 7, 9, 11, 13, 15, 17, 19: /mod_base = "2'-O-methyl corresponding base"
  modified_base 2, 4, 6, 8, 10, 12, 14, 16, 18: /mod_base = "2'-deoxy-2'-fluoro corresponding base"
  modified_base 21: /mod_base = "5'-thio thymidine"
uuccgaauaaacuccaggctt

SEQ ID NO: 1397 - DNA, 21 bp, Artificial sequence
  siRNAs to PCSK9
  modified_base 2, 4, 6, 9, 11, 13, 15, 17, 19: /mod_base = "2'-O-methyl corresponding base"
  modified_base 22: /mod_base = "5'-thio thymidine"
  modified_base 1, 3, 5, 8, 10, 12, 14, 16, 18, 20: /mod_base = "2'-hydroxy corresponding base"
gccuggaguuuauucggaatt

SEQ ID NO: 1398 - DNA, 21 bp, Artificial sequence
  siRNAs to PCSK9
  modified_base 1, 3, 5, 7, 9, 11, 13, 15, 17, 19: /mod_base = "2'-O-methyl corresponding base"
  modified_base 2, 4, 6, 8, 10, 12, 14, 16, 18: /mod_base = "2'-deoxy-2'-fluoro corresponding base"
  modified_base 21: /mod_base = "5'-thio thymidine"
uuccgaauaaacuccaggctt

SEQ ID NO: 1399 - DNA, 21 bp, Artificial sequence
  siRNAs to PCSK9
  modified_base 2, 4, 6, 8, 10, 12, 14, 16, 18: /mod_base = "2'-O-methyl corresponding base"
  modified_base 1, 3, 5, 7, 9, 11, 13, 15, 17, 19: /mod_base = "2'-deoxy-2'-fluoro corresponding base"
  modified_base 21: /mod_base = "thymidine with 3'-abasic nucleotide"
gccuggaguuuauucggaatt

SEQ ID NO: 1400 - DNA, 21 bp, Artificial sequence
  siRNAs to PCSK9
  modified_base 1, 3, 5, 7, 9, 11, 13, 15, 17, 19, 22: /mod_base = "2'-O-methyl corresponding base"
  modified_base 2, 4, 6, 8, 10, 12, 14, 16, 18: /mod_base = "2'-deoxy-2'-fluoro corresponding base"
uuccgaauaaacuccaggctt

SEQ ID NO: 1401 - RNA, 19 nt, Artificial sequence
  siRNAs to PCSK9
  modified_base 2, 4, 6, 8, 10, 12, 14, 16, 18: /mod_base = "2'-O-methyl corresponding base"
  modified_base 1, 3, 5, 7, 9, 11, 13, 15, 17, 19: /mod_base = "2'-deoxy-2'-fluoro corresponding base"
gccuggaguuuauucggaa

SEQ ID NO: 1402 - RNA, 21 nt, Artificial sequence
  siRNAs to PCSK9
  modified_base 1, 3, 5, 7, 9, 11, 13, 15, 17, 19: /mod_base = "2'-O-methyl corresponding base"
  modified_base 2, 4, 6, 8, 10, 12, 14, 16, 18: /mod_base = "2'-deoxy-2'-fluoro corresponding base"
  modified_base 21: /mod_base = "2'-O-methyl corresponding base 5'-monophosphorothioate"
  modified_base 20: /mod_base = "2'-deoxy-2'-fluoro corresponding base 5'-monophosphorothioate"
uuccgaauaaacuccaggccu

SEQ ID NO: 1403 - RNA, 19 nt, Artificial sequence
  siRNAs to PCSK9
  modified_base 2, 4, 6, 8, 10, 12, 14, 16, 18: /mod_base = "2'-O-methyl corresponding base"
  modified_base 1, 3, 5, 7, 9, 11, 13, 15, 17, 19: /mod_base = "2'-deoxy-2'-fluoro corresponding base"
gccuggaguuuauucggaa

SEQ ID NO: 1404 - RNA, 21 nt, Artificial sequence
  siRNAs to PCSK9
  modified_base 6, 7, 10, 11, 17, 18, 19: /mod_base = "2'-O-methyl corresponding base"
  modified_base 20, 21: /mod_base = "2'-O-methyl corresponding base 5'-monophosphorothioate"
uuccgaauaaacuccaggccu

SEQ ID NO: 1405 - RNA, 19 nt, Artificial sequence
  siRNAs to PCSK9
  modified_base 2, 4, 6, 8, 10, 12, 14, 16, 18: /mod_base = "2'-O-methyl corresponding base"
  modified_base 1, 3, 5, 7, 9, 11, 13, 15, 17, 19: /mod_base = "2'-deoxy-2'-fluoro corresponding base"
gccuggaguuuauucggaa

SEQ ID NO: 1406 - RNA, 21 nt, Artificial sequence
  siRNAs to PCSK9
  modified_base 20, 21: /mod_base = "2'-O-methyl corresponding base 5'-monophosphorothioate"
uuccgaauaaacuccaggccu

SEQ ID NO: 1407 - RNA, 19 nt, Artificial sequence
  siRNAs to PCSK9
  modified_base 2, 4, 6, 8, 10, 12, 14, 16, 18: /mod_base = "2'-O-methyl corresponding base"
  modified_base 1, 3, 5, 7, 9, 11, 13, 15, 17, 19: /mod_base = "2'-deoxy-2'-fluoro corresponding base"
gccuggaguuuauucggaa

SEQ ID NO: 1408 - DNA, 21 bp, Artificial sequence
  siRNAs to PCSK9
  modified_base 8, 15: /mod_base = "2'-O-methyl corresponding base"
  modified_base 21: /mod_base = "5'-thio thymidine"
  modified_base 1, 2, 3, 4, 5, 6, 7, 9, 10, 11, 12, 13, 14, 16, 17, 18, 19: /mod_base = "2'-hydroxy corresponding base"
uuccgaauaaacuccaggctt

SEQ ID NO: 1409 - RNA, 19 nt, Artificial sequence
  siRNAs to PCSK9
  modified_base 2, 4, 6, 8, 10, 12, 14, 16, 18: /mod_base = "2'-O-methyl corresponding base"
  modified_base 1, 3, 5, 7, 9, 11, 13, 15, 17, 19: /mod_base = "2'-deoxy-2'-fluoro corresponding base"
gccuggaguuuauucggaa

SEQ ID NO: 1410 - DNA, 21 bp, Artificial sequence
  siRNAs to PCSK9
  modified_base 1, 3, 8, 14, 15: /mod_base = "2'-O-methyl corresponding base"
  modified_base 21: /mod_base = "5'-thio thymidine"
  modified_base 2, 4, 5, 6, 7, 9, 10, 11, 12, 13, 16, 17, 18, 19: /mod_base = "2'-hydroxy corresponding base"
uuccgaauaaacuccaggctt

SEQ ID NO: 1411 - RNA, 19 nt, Artificial sequence
  siRNAs to PCSK9
  modified_base 2, 4, 6, 8, 10, 12, 14, 16, 18: /mod_base = "2'-O-methoxyethyl corresponding base"
gccuggaguuuauucggaa

SEQ ID NO: 1412 - RNA, 19 nt, Artificial sequence
  siRNAs to PCSK9
  modified_base 6, 7, 10, 11, 17, 18, 19: /mod_base = "2'-O-methyl corresponding base"
uuccgaauaaacuccaggc

SEQ ID NO: 1413 - RNA, 19 nt, Artificial sequence
  siRNAs to PCSK9
  modified_base 2, 4, 6, 8, 10, 12, 14, 16, 18: /mod_base = "2'-O-methoxyethyl corresponding base"
gccuggaguuuauucggaa

SEQ ID NO: 1414 - RNA, 19 nt, Artificial sequence
  siRNAs to PCSK9
  modified_base 1, 3, 5, 7, 9, 11, 13, 15, 17, 19: /mod_base = "2'-O-methyl corresponding base"
  modified_base 2, 4, 6, 8, 10, 12, 14, 16, 18: /mod_base = "2'-deoxy-2'-fluoro corresponding base"
uuccgaauaaacuccaggc

SEQ ID NO: 1415 - RNA, 19 nt, Artificial sequence
  siRNAs to PCSK9
  modified_base 2, 4, 6, 8, 10, 12, 14, 16, 18: /mod_base = "2'-O-methoxyethyl corresponding base"
gccuggaguuuauucggaa

SEQ ID NO: 1416 - RNA, 21 nt, Artificial sequence
  siRNAs to PCSK9
  modified_base 1, 3, 5, 7, 9, 11, 13, 15, 17, 19: /mod_base = "2'-O-methyl corresponding base"
  modified_base 2, 4, 6, 8, 10, 12, 14, 16, 18: /mod_base = "2'-deoxy-2'-fluoro corresponding base"
  modified_base 20: /mod_base = "2'-deoxy-2'-fluoro corresponding base 5'-monophosphorothioate"
  modified_base 21: /mod_base = "2'-O-methyl corresponding base 5'-monophosphorothioate"
uuccgaauaaacuccaggccu

SEQ ID NO: 1417 - RNA, 19 nt, Artificial sequence
  siRNAs to PCSK9
  modified_base 2, 4, 6, 8, 10, 12, 14, 16, 18: /mod_base = "2'-O-methoxyethyl corresponding base"
gccuggaguuuauucggaa

SEQ ID NO: 1418 - RNA, 21 nt, Artificial sequence
  siRNAs to PCSK9
  modified_base 20, 21: /mod_base = "2'-O-methyl corresponding base 5'-monophosphorothioate"
uuccgaauaaacuccaggccu

SEQ ID NO: 1419 - RNA, 19 nt, Artificial sequence
  siRNAs to PCSK9
  modified_base 2, 4, 6, 8, 10, 12, 14, 16, 18: /mod_base = "2'-O-methoxyethyl corresponding base"
gccuggaguuuauucggaa

SEQ ID NO: 1420 - DNA, 21 bp, Artificial sequence
  siRNAs to PCSK9
  modified_base 8, 15: /mod_base = "2'-O-methyl corresponding base"
  modified_base 21: /mod_base = "5'-thio thymidine"
  modified_base 1, 2, 3, 4, 5, 6, 7, 9, 10, 11, 12, 13, 14, 16, 17, 18, 19: /mod_base = "2'-hydroxy corresponding base"
uuccgaauaaacuccaggctt

SEQ ID NO: 1421 - RNA, 19 nt, Artificial sequence
  siRNAs to PCSK9
  modified_base 2, 4, 6, 8, 10, 12, 14, 16, 18: /mod_base = "2'-O-methoxyethyl corresponding base"
gccuggaguuuauucggaa

SEQ ID NO: 1422 - DNA, 21 bp, Artificial sequence
  siRNAs to PCSK9
  modified_base 1, 3, 8, 14, 15: /mod_base = "2'-O-methyl corresponding base"
  modified_base 21: /mod_base = "5'-thio thymidine"
  modified_base 2, 4, 5, 6, 7, 9, 10, 11, 12, 13, 16, 17, 18, 19: /mod_base = "2'-hydroxy corresponding base"
uuccgaauaaacuccaggctt

SEQ ID NO: 1423 - RNA, 19 nt, Artificial sequence
  siRNAs to PCSK9
  modified_base 2, 4, 6, 8, 10, 12, 14, 16, 18: /mod_base = "2'-O-methoxyethyl corresponding base"
gccuggaguuuauucggaa

SEQ ID NO: 1424 - RNA, 21 nt, Artificial sequence
  siRNAs to PCSK9
  modified_base 6, 7, 10, 11, 17, 18, 19: /mod_base = "2'-O-methyl corresponding base"
  modified_base 20, 21: /mod_base = "2'-O-methyl corresponding base 5'-monophosphorothioate"
uuccgaauaaacuccaggccu

SEQ ID NO: 1425 - DNA, 21 bp, Artificial sequence
  siRNAs to PCSK9
  modified_base 2, 4, 6, 8, 10, 12, 14, 16, 18: /mod_base = "2'-O-methoxyethyl corresponding base"
  modified_base 21: /mod_base = "5'-thio thymidine"
  modified_base 1, 3, 5, 7, 9, 11, 13, 15, 17, 19: /mod_base = "2'-hydroxy corresponding base"
gccuggaguuuauucggaatt

SEQ ID NO: 1426 - DNA, 21 bp, Artificial sequence
  siRNAs to PCSK9
  modified_base 6, 7, 10, 11, 17, 18, 19: /mod_base = "2'-O-methyl corresponding base"
  modified_base 21: /mod_base = "5'-thio thymidine"
  modified_base 1, 2, 3, 4, 5, 8, 9, 12, 13, 14, 15, 16: /mod_base = "2'-hydroxy corresponding base"
uuccgaauaaacuccaggctt

SEQ ID NO: 1427 - DNA, 21 bp, Artificial sequence
  siRNAs to PCSK9
  modified_base 2, 4, 6, 8, 10, 12, 14, 16, 18: /mod_base = "2'-O-methoxyethyl corresponding base"
  modified_base 21: /mod_base = "5'-thio thymidine"
  modified_base 1, 3, 5, 7, 9, 11, 13, 15, 17, 19: /mod_base = "2'-hydroxy corresponding base"
gccuggaguuuauucggaatt

SEQ ID NO: 1428 - DNA, 21 bp, Artificial sequence
  siRNAs to PCSK9
  modified_base 8, 15: /mod_base = "2'-O-methyl corresponding base"
  modified_base 21: /mod_base = "5'-thio thymidine"
  modified_base 1, 2, 3, 4, 5, 6, 7, 9, 10, 11, 12, 13, 14, 16, 17, 18, 19: /mod_base = "2'-hydroxy corresponding base"
uuccgaauaaacuccaggctt

SEQ ID NO: 1429 - DNA, 21 bp, Artificial sequence
  siRNAs to PCSK9
  modified_base 2, 4, 6, 8, 10, 12, 14, 16, 18: /mod_base = "2'-O-methoxyethyl corresponding base"
  modified_base 21: /mod_base = "5'-thio thymidine"
  modified_base 1, 3, 5, 7, 9, 11, 13, 15, 17, 19: /mod_base = "2'-hydroxy corresponding base"
gccuggaguuuauucggaatt

SEQ ID NO: 1430 - DNA, 21 bp, Artificial sequence
  siRNAs to PCSK9
  modified_base 21: /mod_base = "5'-thio thymidine"
  modified_base 1..19: /mod_base = "2'-hydroxy corresponding base"
uuccgaauaaacuccaggctt

SEQ ID NO: 1431 - DNA, 21 bp, Artificial sequence
  siRNAs to PCSK9
  modified_base 2, 3, 4, 9, 10, 11, 13, 14, 15: /mod_base = "2'-O-methoxyethyl corresponding base"
  modified_base 21: /mod_base = "5'-thio thymidine"
  modified_base 1, 5, 6, 7, 8, 12, 16, 17, 18, 19: /mod_base = "2'-hydroxy corresponding base"
gccuggaguuuauucggaatt

SEQ ID NO: 1432 - DNA, 21 bp, Artificial sequence
  siRNAs to PCSK9
  modified_base 6, 7, 10, 11, 17, 18, 19: /mod_base = "2'-O-methyl corresponding base"
  modified_base 21: /mod_base = "5'-thio thymidine"
  modified_base 1, 2, 3, 4, 5, 8, 9, 12, 13, 14, 15, 16: /mod_base = "2'-hydroxy corresponding base"
uuccgaauaaacuccaggctt

SEQ ID NO: 1433 - DNA, 21 bp, Artificial sequence
  siRNAs to PCSK9
  modified_base 2, 3, 4, 9, 10, 11, 13, 14, 15: /mod_base = "2'-O-methoxyethyl corresponding base"
  modified_base 21: /mod_base = "5'-thio thymidine"
  modified_base 1, 5, 6, 7, 8, 12, 16, 17, 18, 19: /mod_base = "2'-hydroxy corresponding base"
gccuggaguuuauucggaatt

SEQ ID NO: 1434 - DNA, 21 bp, Artificial sequence
  siRNAs to PCSK9
  modified_base 8, 15: /mod_base = "2'-O-methyl corresponding base"
  modified_base 21: /mod_base = "5'-thio thymidine"
  modified_base 1, 2, 3, 4, 5, 6, 7, 9, 10, 11, 12, 13, 14, 16, 17, 18, 19: /mod_base = "2'-hydroxy corresponding base"
uuccgaauaaacuccaggctt

SEQ ID NO: 1435 - DNA, 21 bp, Artificial sequence
  siRNAs to PCSK9
  modified_base 2, 3, 4, 9, 10, 11, 13, 14, 15: /mod_base = "2'-O-methoxyethyl corresponding base"
  modified_base 21: /mod_base = "5'-thio thymidine"
  modified_base 1, 5, 6, 7, 8, 12, 16, 17, 18, 19: /mod_base = "2'-hydroxy corresponding base"
gccuggaguuuauucggaatt

SEQ ID NO: 1436 - DNA, 21 bp, Artificial sequence
  siRNAs to PCSK9
  modified_base 21: /mod_base = "5'-thio thymidine"
  modified_base 1..19: /mod_base = "2'-hydroxy corresponding base"
uuccgaauaaacuccaggctt

SEQ ID NO: 1437 - DNA, 21 bp, Artificial sequence
  siRNAs to PCSK9
  modified_base 2, 3, 4, 9, 10, 11, 13, 14, 15: /mod_base = "2'-O-methoxyethyl corresponding base"
  modified_base 21: /mod_base = "5'-thio thymidine"
  modified_base 1, 5, 6, 7, 8, 12, 16, 17, 18, 19: /mod_base = "2'-hydroxy corresponding base"
gccuggaguuuauucggaatt

SEQ ID NO: 1438 - DNA, 21 bp, Artificial sequence
  siRNAs to PCSK9
  modified_base 1, 2, 3, 4, 8, 12, 13, 14, 15, 19: /mod_base = "2'-deoxy-2'-fluoro corresponding base"
  modified_base 21: /mod_base = "5'-thio thymidine"
  modified_base 5, 6, 7, 9, 10, 11, 16, 17, 18: /mod_base = "2'-hydroxy corresponding base"
uuccgaauaaacuccaggctt

SEQ ID NO: 1439 - DNA, 21 bp, Artificial sequence
  siRNAs to PCSK9
  modified_base 2, 3, 4, 9, 10, 11, 13, 14, 15: /mod_base = "2'-O-methoxyethyl corresponding base"
  modified_base 21: /mod_base = "5'-thio thymidine"
  modified_base 1, 5, 6, 7, 8, 12, 16, 17, 18, 19: /mod_base = "2'-hydroxy corresponding base"
gccuggaguuuauucggaatt

SEQ ID NO: 1440 - RNA, 21 nt, Artificial sequence
  siRNAs to PCSK9
  modified_base 1, 2, 3, 4, 8, 12, 13, 14, 15, 19: /mod_base = "2'-deoxy-2'-fluoro corresponding base"
  modified_base 20, 21: /mod_base = "2'-deoxy-2'-fluoro corresponding base 5'-monophosphorothioate"
uuccgaauaaacuccaggccu

SEQ ID NO: 1441 - DNA, 21 bp, Artificial sequence
  siRNAs to PCSK9
  modified_base 2, 3, 4, 9, 10, 11, 13, 14, 15: /mod_base = "2'-O-methoxyethyl corresponding base"
  modified_base 21: /mod_base = "5'-thio thymidine"
  modified_base 1, 5, 6, 7, 8, 12, 16, 17, 18, 19: /mod_base = "2'-hydroxy corresponding base"
gccuggaguuuauucggaatt

SEQ ID NO: 1442 - RNA, 21 nt, Artificial sequence
  siRNAs to PCSK9
  modified_base 1, 3, 5, 7, 9, 11, 13, 15, 17, 19: /mod_base = "2'-O-methyl corresponding base"
  modified_base 2, 4, 6, 8, 10, 12, 14, 16, 18: /mod_base = "2'-deoxy-2'-fluoro corresponding base"
  modified_base 21: /mod_base = "2'-O-methyl corresponding base 5'-monophosphorothioate"
  modified_base 20: /mod_base = "2'-deoxy-2'-fluoro corresponding base 5'-monophosphorothioate"
uuccgaauaaacuccaggccu

SEQ ID NO: 1443 - DNA, 21 bp, Artificial sequence
  siRNAs to PCSK9
  modified_base 2, 3, 4, 9, 10, 11, 13, 14, 15: /mod_base = "2'-O-methoxyethyl corresponding base"
  modified_base 21: /mod_base = "5'-thio thymidine"
  modified_base 1, 5, 6, 7, 8, 12, 16, 17, 18, 19: /mod_base = "2'-hydroxy corresponding base"
gccuggaguuuauucggaatt

SEQ ID NO: 1444 - DNA, 21 bp, Artificial sequence
  siRNAs to PCSK9
  modified_base 21: /mod_base = "5'-thio thymidine"
  modified_base 1..19: /mod_base = "2'-hydroxy corresponding base"
uuccgaauaaacuccaggctt

SEQ ID NO: 1445 - DNA, 21 bp, Artificial sequence
  siRNAs to PCSK9
  modified_base 2, 3, 4, 9, 10, 11, 13, 14, 15: /mod_base = "2'-deoxy-2'-fluoro corresponding base"
  modified_base 21: /mod_base = "5'-thio thymidine"
  modified_base 1, 5, 6, 7, 8, 12, 16, 17, 18, 19: /mod_base = "2'-hydroxy corresponding base"
gccuggaguuuauucggaatt

SEQ ID NO: 1446 - DNA, 21 bp, Artificial sequence
  siRNAs to PCSK9
  modified_base 1, 2, 3, 4, 8, 12, 13, 14, 15, 19: /mod_base = "2'-deoxy-2'-fluoro corresponding base"
  modified_base 21: /mod_base = "5'-thio thymidine"
  modified_base 5, 6, 7, 9, 10, 11, 16, 17, 18: /mod_base = "2'-hydroxy corresponding base"
uuccgaauaaacuccaggctt

SEQ ID NO: 1447 - DNA, 21 bp, Artificial sequence
  siRNAs to PCSK9
  modified_base 2, 3, 4, 9, 10, 11, 13, 14, 15: /mod_base = "2'-deoxy-2'-fluoro corresponding base"
  modified_base 21: /mod_base = "5'-thio thymidine"
  modified_base 1, 5, 6, 7, 8, 12, 16, 17, 18, 19: /mod_base = "2'-hydroxy corresponding base"
gccuggaguuuauucggaatt

SEQ ID NO: 1448 - DNA, 21 bp, Artificial sequence
  siRNAs to PCSK9
  modified_base 21: /mod_base = "5'-thio thymidine"
  modified_base 1..19: /mod_base = "2'-hydroxy corresponding base"
uuccgaauaaacuccaggctt

SEQ ID NO: 1449 - DNA, 21 bp, Artificial sequence
  siRNAs to PCSK9
  modified_base 2, 3, 4, 9, 10, 11, 13, 14, 15: /mod_base = "2'-deoxy-2'-fluoro corresponding base"
  modified_base 21: /mod_base = "5'-thio thymidine"
  modified_base 1, 5, 6, 7, 8, 12, 16, 17, 18, 19: /mod_base = "2'-hydroxy corresponding base"
gccuggaguuuauucggaatt

SEQ ID NO: 1450 - DNA, 21 bp, Artificial sequence
  siRNAs to PCSK9
  modified_base 1, 3, 8, 14, 15: /mod_base = "2'-O-methyl corresponding base"
  modified_base 21: /mod_base = "5'-thio thymidine"
  modified_base 2, 4, 5, 6, 7, 9, 10, 11, 12, 13, 16, 17, 18, 19: /mod_base = "2'-hydroxy corresponding base"
uuccgaauaaacuccaggctt

SEQ ID NO: 1451 - DNA, 21 bp, Artificial sequence
  siRNAs to PCSK9
  modified_base 2, 3, 4, 9, 10, 11, 13, 14, 15: /mod_base = "2'-deoxy-2'-fluoro corresponding base"
  modified_base 21: /mod_base = "5'-thio thymidine"
  modified_base 1, 5, 6, 7, 8, 12, 16, 17, 18, 19: /mod_base = "2'-hydroxy corresponding base"
gccuggaguuuauucggaatt

SEQ ID NO: 1452 - RNA, 21 nt, Artificial sequence
  siRNAs to PCSK9
  modified_base 6, 7, 10, 11, 17, 18, 19: /mod_base = "2'-O-methyl corresponding base"
  modified_base 20, 21: /mod_base = "2'-O-methyl corresponding base 5'-monophosphorothioate"
uuccgaauaaacuccaggccu

SEQ ID NO: 1453 - DNA, 21 bp, Artificial sequence
  siRNAs to PCSK9
  modified_base 2, 3, 4, 9, 10, 11, 13, 14, 15: /mod_base = "2'-deoxy-2'-fluoro corresponding base"
  modified_base 21: /mod_base = "5'-thio thymidine"
  modified_base 1, 5, 6, 7, 8, 12, 16, 17, 18, 19: /mod_base = "2'-hydroxy corresponding base"
gccuggaguuuauucggaatt

SEQ ID NO: 1454 - RNA, 21 nt, Artificial sequence
  siRNAs to PCSK9
  modified_base 20, 21: /mod_base = "2'-O-methyl corresponding base 5'-monophosphorothioate"
uuccgaauaaacuccaggccu

SEQ ID NO: 1455 - DNA, 21 bp, Artificial sequence
  siRNAs to PCSK9
  modified_base 2, 3, 4, 9, 10, 11, 13, 14, 15: /mod_base = "2'-deoxy-2'-fluoro corresponding base"
  modified_base 21: /mod_base = "5'-thio thymidine"
  modified_base 1, 5, 6, 7, 8, 12, 16, 17, 18, 19: /mod_base = "2'-hydroxy corresponding base"
gccuggaguuuauucggaatt

SEQ ID NO: 1456 - RNA, 21 nt, Artificial sequence
  siRNAs to PCSK9
  modified_base 1, 3, 5, 7, 9, 11, 13, 15, 17, 19: /mod_base = "2'-O-methyl corresponding base"
  modified_base 2, 4, 6, 8, 10, 12, 14, 16, 18: /mod_base = "2'-deoxy-2'-fluoro corresponding base"
  modified_base 21: /mod_base = "2'-O-methyl corresponding base 5'-monophosphorothioate"
  modified_base 20: /mod_base = "2'-deoxy-2'-fluoro corresponding base 5'-monophosphorothioate"
uuccgaauaaacuccaggccu

SEQ ID NO: 1457 - DNA, 21 bp, Artificial sequence
  siRNAs to PCSK9
  modified_base 2, 3, 4, 9, 10, 11, 13, 14, 15: /mod_base = "2'-deoxy-2'-fluoro corresponding base"
  modified_base 21: /mod_base = "5'-thio thymidine"
  modified_base 1, 5, 6, 7, 8, 12, 16, 17, 18, 19: /mod_base = "2'-hydroxy corresponding base"
gccuggaguuuauucggaatt

SEQ ID NO: 1458 - DNA, 21 bp, Artificial sequence
  siRNAs to PCSK9
  modified_base 1, 3, 5, 7, 9, 11, 13, 15, 17, 19: /mod_base = "2'-O-methyl corresponding base"
  modified_base 2, 4, 6, 8, 10, 12, 14, 16, 18: /mod_base = "2'-deoxy-2'-fluoro corresponding base"
  modified_base 21: /mod_base = "5'-thio thymidine"
uuccgaauaaacuccaggctt

SEQ ID NO: 1459 - DNA, 21 bp, Artificial sequence
  siRNAs to PCSK9
  modified_base 2, 3, 4, 9, 10, 11, 13, 14, 15: /mod_base = "2'-deoxy-2'-fluoro corresponding base"
  modified_base 21: /mod_base = "5'-thio thymidine"
  modified_base 1, 5, 6, 7, 8, 12, 16, 17, 18, 19: /mod_base = "2'-hydroxy corresponding base"
gccuggaguuuauucggaatt

SEQ ID NO: 1460 - DNA, 21 bp, Artificial sequence
  siRNAs to PCSK9
  modified_base 1, 2, 3, 4, 8, 12, 13, 14, 15, 19: /mod_base = "2'-deoxy-2'-fluoro corresponding base"
  modified_base 21: /mod_base = "5'-thio thymidine"
  modified_base 5, 6, 7, 9, 10, 11, 16, 17, 18: /mod_base = "2'-hydroxy corresponding base"
uuccgaauaaacuccaggctt

SEQ ID NO: 1461 - DNA, 21 bp, Artificial sequence
  siRNAs to PCSK9
  modified_base 21: /mod_base = "5'-thio thymidine"
  modified_base 1..19: /mod_base = "2'-hydroxy corresponding base"
gccuggaguuuauucggaatt

SEQ ID NO: 1462 - DNA, 21 bp, Artificial sequence
  siRNAs to PCSK9
  modified_base 1, 2, 3, 4, 8, 12, 13, 14, 15, 19: /mod_base = "2'-deoxy-2'-fluoro corresponding base"
  modified_base 21: /mod_base = "5'-thio thymidine"
  modified_base 5, 6, 7, 9, 10, 11, 16, 17, 18: /mod_base = "2'-hydroxy corresponding base"
uuccgaauaaacuccaggctt

SEQ ID NO: 1463 - DNA, 21 bp, Artificial sequence
  siRNAs to PCSK9
  modified_base 2, 3, 4, 9, 10, 11, 13, 14, 15: /mod_base = "2'-O-methyl corresponding base"
  modified_base 21: /mod_base = "5'-thio thymidine"
  modified_base 1, 5, 6, 7, 8, 12, 16, 17, 18, 19: /mod_base = "2'-hydroxy corresponding base"
gccuggaguuuauucggaatt

SEQ ID NO: 1464 - DNA, 21 bp, Artificial sequence
  siRNAs to PCSK9
  modified_base 1, 2, 3, 4, 8, 12, 13, 14, 15, 19: /mod_base = "2'-deoxy-2'-fluoro corresponding base"
  modified_base 21: /mod_base = "5'-thio thymidine"
  modified_base 5, 6, 7, 9, 10, 11, 16, 17, 18: /mod_base = "2'-hydroxy corresponding base"
uuccgaauaaacuccaggctt

SEQ ID NO: 1465 - DNA, 21 bp, Artificial sequence
  siRNAs to PCSK9
  modified_base 2, 4, 6, 9, 11, 13, 15, 17, 19: /mod_base = "2'-O-methyl corresponding base"
  modified_base 22: /mod_base = "5'-thio thymidine"
  modified_base 1, 3, 5, 8, 10, 12, 14, 16, 18, 20: /mod_base = "2'-hydroxy corresponding base"
gccuggaguuuauucggaatt

SEQ ID NO: 1466 - DNA, 21 bp, Artificial sequence
  siRNAs to PCSK9
  modified_base 1, 2, 3, 4, 8, 12, 13, 14, 15, 19: /mod_base = "2'-deoxy-2'-fluoro corresponding base"
  modified_base 21: /mod_base = "5'-thio thymidine"
  modified_base 5, 6, 7, 9, 10, 11, 16, 17, 18: /mod_base = "2'-hydroxy corresponding base"
uuccgaauaaacuccaggctt

SEQ ID NO: 1467 - RNA, 19 nt, Artificial sequence
  siRNAs to PCSK9
  modified_base 2, 4, 6, 8, 10, 12, 14, 16, 18: /mod_base = "2'-O-methyl corresponding base"
  modified_base 1, 3, 5, 7, 9, 11, 13, 15, 17, 19: /mod_base = "2'-deoxy-2'-fluoro corresponding base"
gccuggaguuuauucggaa

SEQ ID NO: 1468 - DNA, 21 bp, Artificial sequence
  siRNAs to PCSK9
  modified_base 1, 2, 3, 4, 8, 12, 13, 14, 15, 19: /mod_base = "2'-deoxy-2'-fluoro corresponding base"
  modified_base 21: /mod_base = "5'-thio thymidine"
  modified_base 5, 6, 7, 9, 10, 11, 16, 17, 18: /mod_base = "2'-hydroxy corresponding base"
uuccgaauaaacuccaggctt

SEQ ID NO: 1469 - RNA, 20 nt, Artificial sequence
  siRNAs to PCSK9
  modified_base 2, 3, 4, 10, 11, 12, 14, 15, 16: /mod_base = "2'-deoxy-2'-fluoro corresponding base"
gccuggagguuuauucggaa

SEQ ID NO: 1470 - RNA, 21 nt, Artificial sequence
  siRNAs to PCSK9
  modified_base 1, 2, 3, 4, 8, 12, 13, 14, 15, 19: /mod_base = "2'-deoxy-2'-fluoro corresponding base"
  modified_base 20, 21: /mod_base = "2'-deoxy-2'-fluoro corresponding base 5'-monophosphorothioate"
uuccgaauaaacuccaggccu

SEQ ID NO: 1471 - RNA, 20 nt, Artificial sequence
  siRNAs to PCSK9
  modified_base 2, 3, 4, 10, 11, 12, 14, 15, 16: /mod_base = "2'-deoxy-2'-fluoro corresponding base"
gccuggagguuuauucggaa

SEQ ID NO: 1472 - RNA, 19 nt, Artificial sequence
  siRNAs to PCSK9
  modified_base 1, 3, 5, 7, 9, 11, 13, 15, 17, 19: /mod_base = "2'-O-methyl corresponding base"
  modified_base 2, 4, 6, 8, 10, 12, 14, 16, 18: /mod_base = "2'-deoxy-2'-fluoro corresponding base"
uuccgaauaaacuccaggc

SEQ ID NO: 1473 - RNA, 20 nt, Artificial sequence
  siRNAs to PCSK9
  modified_base 2, 3, 4, 10, 11, 12, 14, 15, 16: /mod_base = "2'-deoxy-2'-fluoro corresponding base"
gccuggagguuuauucggaa

SEQ ID NO: 1474 - RNA, 21 nt, Artificial sequence
  siRNAs to PCSK9
  modified_base 1, 3, 5, 7, 9, 11, 13, 15, 17, 19: /mod_base = "2'-O-methyl corresponding base"
  modified_base 2, 4, 6, 8, 10, 12, 14, 16, 18: /mod_base = "2'-deoxy-2'-fluoro corresponding base"
  modified_base 21: /mod_base = "2'-O-methyl corresponding base 5'-monophosphorothioate"
  modified_base 20: /mod_base = "2'-deoxy-2'-fluoro corresponding base 5'-monophosphorothioate"
uuccgaauaaacuccaggccu

SEQ ID NO: 1475 - RNA, 20 nt, Artificial sequence
  siRNAs to PCSK9
  modified_base 2, 3, 4, 10, 11, 12, 14, 15, 16: /mod_base = "2'-deoxy-2'-fluoro corresponding base"
gccuggagguuuauucggaa

SEQ ID NO: 1476 - RNA, 21 nt, Artificial sequence
  siRNAs to PCSK9
  modified_base 20, 21: /mod_base = "2'-O-methyl corresponding base 5'-monophosphorothioate"
uuccgaauaaacuccaggccu

SEQ ID NO: 1477 - RNA, 20 nt, Artificial sequence
  siRNAs to PCSK9
  modified_base 2, 3, 4, 10, 11, 12, 14, 15, 16: /mod_base = "2'-deoxy-2'-fluoro corresponding base"
gccuggagguuuauucggaa

SEQ ID NO: 1478 - RNA, 19 nt, Artificial sequence
  siRNAs to PCSK9
  modified_base 6, 7, 10, 11, 17, 18, 19: /mod_base = "2'-O-methyl corresponding base"
uuccgaauaaacuccaggc

SEQ ID NO: 1479 - RNA, 20 nt, Artificial sequence
  siRNAs to PCSK9
  modified_base 2, 3, 4, 10, 11, 12, 14, 15, 16: /mod_base = "2'-deoxy-2'-fluoro corresponding base"
gccuggagguuuauucggaa

SEQ ID NO: 1480 - DNA, 21 bp, Artificial sequence
  siRNAs to PCSK9
  modified_base 21: /mod_base = "5'-thio thymidine"
  modified_base 1..19: /mod_base = "2'-hydroxy corresponding base"
uuccgaauaaacuccaggctt

SEQ ID NO: 1481 - RNA, 20 nt, Artificial sequence
  siRNAs to PCSK9
  modified_base 2, 3, 4, 10, 11, 12, 14, 15, 16: /mod_base = "2'-deoxy-2'-fluoro corresponding base"
gccuggagguuuauucggaa

SEQ ID NO: 1482 - DNA, 21 bp, Artificial sequence
  siRNAs to PCSK9
  modified_base 8, 15: /mod_base = "2'-O-methyl corresponding base"
  modified_base 21: /mod_base = "5'-thio thymidine"
  modified_base 1, 2, 3, 4, 5, 6, 7, 9, 10, 11, 12, 13, 14, 16, 17, 18, 19: /mod_base = "2'-hydroxy corresponding base"
uuccgaauaaacuccaggctt

SEQ ID NO: 1483 - RNA, 20 nt, Artificial sequence
  siRNAs to PCSK9
  modified_base 2, 3, 4, 10, 11, 12, 14, 15, 16: /mod_base = "2'-deoxy-2'-fluoro corresponding base"
gccuggagguuuauucggaa

SEQ ID NO: 1484 - DNA, 21 bp, Artificial sequence
  siRNAs to PCSK9
  modified_base 1, 3, 8, 14, 15: /mod_base = "2'-O-methyl corresponding base"
  modified_base 21: /mod_base = "5'-thio thymidine"
  modified_base 2, 4, 5, 6, 7, 9, 10, 11, 12, 13, 16, 17, 18, 19: /mod_base = "2'-hydroxy corresponding base"
uuccgaauaaacuccaggctt

SEQ ID NO: 1485 - DNA, 21 bp, Artificial sequence
  siRNAs to PCSK9
  modified_base 2, 4, 6, 8, 10, 12, 14, 16, 18: /mod_base = "2'-O-methoxyethyl corresponding base"
  modified_base 21: /mod_base = "5'-thio thymidine"
  modified_base 1, 3, 5, 7, 9, 11, 13, 15, 17, 19: /mod_base = "2'-hydroxy corresponding base"
gccuggaguuuauucggaatt

SEQ ID NO: 1486 - RNA, 21 nt, Artificial sequence
  siRNAs to PCSK9
  modified_base 1, 2, 3, 4, 8, 12, 13, 14, 15, 19: /mod_base = "2'-deoxy-2'-fluoro corresponding base"
  modified_base 20, 21: /mod_base = "2'-deoxy-2'-fluoro corresponding base 5'-monophosphorothioate"
uuccgaauaaacuccaggccu

SEQ ID NO: 1487 - RNA, 19 nt, Artificial sequence
  siRNAs to PCSK9
  modified_base 2, 4, 6, 8, 10, 12, 14, 16, 18: /mod_base = "2'-O-methoxyethyl corresponding base"
gccuggaguuuauucggaa

SEQ ID NO: 1488 - RNA, 21 nt, Artificial sequence
  siRNAs to PCSK9
  modified_base 1, 2, 3, 4, 8, 12, 13, 14, 15, 19: /mod_base = "2'-deoxy-2'-fluoro corresponding base"
  modified_base 20, 21: /mod_base = "2'-deoxy-2'-fluoro corresponding base 5'-monophosphorothioate"
uuccgaauaaacuccaggccu

SEQ ID NO: 1489 - RNA, 19 nt, Artificial sequence
  siRNAs to PCSK9
  modified_base 2, 4, 6, 8, 10, 12, 14, 16, 18: /mod_base = "2'-O-methyl corresponding base"
  modified_base 1, 3, 5, 7, 9, 11, 13, 15, 17, 19: /mod_base = "2'-deoxy-2'-fluoro corresponding base"
gccuggaguuuauucggaa

SEQ ID NO: 1490 - RNA, 21 nt, Artificial sequence
  siRNAs to PCSK9
  modified_base 1, 2, 3, 4, 8, 12, 13, 14, 15, 19: /mod_base = "2'-deoxy-2'-fluoro corresponding base"
  modified_base 20, 21: /mod_base = "2'-deoxy-2'-fluoro corresponding base 5'-monophosphorothioate"
uuccgaauaaacuccaggccu

SEQ ID NO: 1491 - DNA, 21 bp, Artificial sequence
  siRNAs to PCSK9
  modified_base 2, 4, 6, 8, 10, 12, 14, 16, 18: /mod_base = "2'-O-methyl corresponding base"
  modified_base 1, 3, 5, 7, 9, 11, 13, 15, 17, 19: /mod_base = "2'-deoxy-2'-fluoro corresponding base"
  modified_base 21: /mod_base = "5'-thio thymidine"
gccuggaguuuauucggaatt

SEQ ID NO: 1492 - RNA, 21 nt, Artificial sequence
  siRNAs to PCSK9
  modified_base 1, 2, 3, 4, 8, 12, 13, 14, 15, 19: /mod_base = "2'-deoxy-2'-fluoro corresponding base"
  modified_base 20, 21: /mod_base = "2'-deoxy-2'-fluoro corresponding base 5'-monophosphorothioate"
uuccgaauaaacuccaggccu

SEQ ID NO: 1493 - DNA, 21 bp, Artificial sequence
  siRNAs to PCSK9
  modified_base 2, 4, 6, 9, 11, 13, 15, 17, 19: /mod_base = "2'-O-methyl corresponding base"
  modified_base 22: /mod_base = "5'-thio thymidine"
  modified_base 1, 3, 5, 8, 10, 12, 14, 16, 18, 20: /mod_base = "2'-hydroxy corresponding base"
gccuggaguuuauucggaatt

SEQ ID NO: 1494 - RNA, 21 nt, Artificial sequence
  siRNAs to PCSK9
  modified_base 1, 2, 3, 4, 8, 12, 13, 14, 15, 19: /mod_base = "2'-deoxy-2'-fluoro corresponding base"
  modified_base 20, 21: /mod_base = "2'-deoxy-2'-fluoro corresponding base 5'-monophosphorothioate"
uuccgaauaaacuccaggccu

SEQ ID NO: 1495 - DNA, 21 bp, Artificial sequence
  siRNAs to PCSK9
  modified_base 21: /mod_base = "5'-thio thymidine"
  modified_base 1..19: /mod_base = "2'-hydroxy corresponding base"
gccuggaguuuauucggaatt

SEQ ID NO: 1496 - RNA, 21 nt, Artificial sequence
  siRNAs to PCSK9
  modified_base 1, 2, 3, 4, 8, 12, 13, 14, 15, 19: /mod_base = "2'-deoxy-2'-fluoro corresponding base"
  modified_base 20, 21: /mod_base = "2'-deoxy-2'-fluoro corresponding base 5'-monophosphorothioate"
uuccgaauaaacuccaggccu

SEQ ID NO: 1497 - DNA, 21 bp, Artificial sequence
  siRNAs to PCSK9
  modified_base 2, 3, 4, 9, 10, 11, 13, 14, 15: /mod_base = "2'-O-methyl corresponding base"
  modified_base 21: /mod_base = "5'-thio thymidine"
  modified_base 1, 5, 6, 7, 8, 12, 16, 17, 18, 19: /mod_base = "2'-hydroxy corresponding base"
gccuggaguuuauucggaatt

SEQ ID NO: 1498 - RNA, 21 nt, Artificial sequence
  siRNAs to PCSK9
  modified_base 1, 2, 3, 4, 8, 12, 13, 14, 15, 19: /mod_base = "2'-deoxy-2'-fluoro corresponding base"
  modified_base 20, 21: /mod_base = "2'-deoxy-2'-fluoro corresponding base 5'-monophosphorothioate"
uuccgaauaaacuccaggccu

SEQ ID NO: 1499 - RNA, 19 nt, Artificial sequence
  siRNAs to PCSK9
  modified_base 2, 3, 4, 9, 10, 11, 13, 14, 15: /mod_base = "2'-O-methyl corresponding base"
gccuggaguuuauucggaa

SEQ ID NO: 1500 - RNA, 21 nt, Artificial sequence
  siRNAs to PCSK9
  modified_base 1, 2, 3, 4, 8, 12, 13, 14, 15, 19: /mod_base = "2'-deoxy-2'-fluoro corresponding base"
  modified_base 20, 21: /mod_base = "2'-deoxy-2'-fluoro corresponding base 5'-monophosphorothioate"
uuccgaauaaacuccaggccu

SEQ ID NO: 1501 - RNA, 20 nt, Artificial sequence
  siRNAs to PCSK9
  modified_base 2, 3, 4, 10, 11, 12, 14, 15, 16: /mod_base = "2'-deoxy-2'-fluoro corresponding base"
gccuggagguuuauucggaa

SEQ ID NO: 1502 - RNA, 21 nt, Artificial sequence
  siRNAs to PCSK9
  modified_base 1, 2, 3, 4, 8, 12, 13, 14, 15, 19: /mod_base = "2'-deoxy-2'-fluoro corresponding base"
  modified_base 20, 21: /mod_base = "2'-deoxy-2'-fluoro corresponding base 5'-monophosphorothioate"
uuccgaauaaacuccaggccu

SEQ ID NO: 1503 - DNA, 21 bp, Artificial sequence
  siRNAs to PCSK9
  modified_base 21: /mod_base = "5'-thio thymidine"
  modified_base 1..19: /mod_base = "2'-hydroxy corresponding base"
gccuggaguuuauucggaatt

SEQ ID NO: 1504 - DNA, 21 bp, Artificial sequence
  siRNAs to PCSK9
  modified_base 21: /mod_base = "5'-thio thymidine"
  modified_base 1..19: /mod_base = "2'-hydroxy corresponding base"
uuccgaauaaacuccaggctt

We claim:

1. A double-stranded ribonucleic acid (dsRNA) for inhibiting the expression of a human PCSK9 gene in a cell, wherein said dsRNA comprises at least two sequences that are complementary to each other and wherein a sense strand comprises a first sequence and an antisense strand comprises a second sequence comprising a region of complementarity which is substantially complementary to at least a part of a mRNA encoding PCSK9, and wherein said, region of complementarity is less than 30 nucleotides in length and wherein said dsRNA, upon contact with a cell expressing said PCSK9, inhibits expression of said PCSK9 gene.

2. The dsRNA of claim 1, wherein said first sequence is selected from the group consisting of Tables 1 and 2 and said, second sequence is selected from the group consisting of Tables 1 and 2.

3. The dsRNA of claim 1, wherein said dsRNA comprises at least one modified nucleotide.

4. The dsRNA of claim 2, wherein said dsRNA comprises at least one modified nucleotide.

5. The dsRNA of claim 3, wherein said, modified nucleotide is chosen from the group of: a 2′-O-methyl modified nucleotide, a nucleotide comprising a S′-phosphorothioate group, and a terminal nucleotide linked to a cholesteryl derivative of dodecanoic acid bisdecylamide group.

6. The dsRNA of claim 3> wherein said modified nucleotide is chosen from the group of: a 2′-O-deoxy-2′-fluoro modified nucleotide, a 2′-deoxy-modified nucleotide, a locked nucleotide, an abasic nucleotide, 2′-amino-modified nucleotide, 2′-alkyl-modified nucleotide, morpholino nucleotide, a phosphoramidate, and a non-natural base comprising nucleotide.

7. The dsRNA of claim 3, wherein said first sequence is selected from the group consisting of Tables 1 and 2 and said second sequence is selected from the group consisting of Tables 1 and 2

8. The dsRNA of claim 6, wherein said first sequence is selected from the group consisting of Tables 1 and 2, and said second sequence is selected from the group consisting of Tables 1 and 2.

9. A cell comprising the dsRNA of claim 1.

10. A pharmaceutical composition for inhibiting the expression of the PCSK9 gene in an organism, comprising a dsRNA and a pharmaceutically acceptable carrier, wherein the dsRNA comprises at least two sequences that are complementary to each other and wherein a sense strand comprises a first sequence and an antisense strand comprises a second sequence comprising a region of complementarity which is substantially complementary to at least a past of a mRNA encoding PCSK9, and wherein said region of complementarity is less than 30 nucleotides in length and wherein said dsRNA, upon contact with a cell expressing said PCSK9, inhibits expression of said PCSK9 gene.

11. The pharmaceutical composition of claim 10, wherein said first sequence of said dsRNA is selected from the group consisting of Tables 1 and 2, and said second sequence of said dsRNA is selected from the group consisting of Tables 1 and 2.

12. The pharmaceutical composition of claim 10, wherein said first sequence of said dsRNA is selected from the group consisting of Tables 1 and 2 and said second sequence of said dsRNA is selected from the group consisting of Tables 1 and 2.

13. A method for inhibiting the expression of the PCSK9 gene in a cell, the method comprising:
(a) introducing into the cell a double-stranded ribonucleic acid (dsRNA), wherein the dsRNA comprises at least two sequences that are complementary to each other and wherein a sense strand comprises a first sequence and an antisense strand comprises a second sequence comprising a region of complementarity which is substantially complementary to at least a part, of a mRNA encoding PCSK9, and wherein said region of complementarity is less than 30 nucleotides in length and wherein said dsRNA, upon contact with a cell expressing said PCSK9, inhibits expression of said PCSK9 gene; and
(b) maintaining the cell, produced in step (a) for a time sufficient to obtain degradation of the mRNA transcript of the PCSK9 gene, thereby inhibiting expression of the PCSK9 gene in the cell.

14. A method of treating, preventing or managing pathological processes which can be mediated by down regulating PCSK9 gene expression comprising administering to a patient in need of such treatment, prevention or management a therapeutically or prophylactically effective amount of a dsRNA, wherein the dsRNA comprises at least two sequences that are complementary to each other and wherein a sense strand comprises a first sequence and an antisense strand comprises a second sequence comprising a region of complementarity which is substantially complementary to at least a part of a mRNA encoding PCSK9, and wherein said region of complementarity is less than 30 nucleotides in length and wherein said dsRNA, upon contact with a cell expressing said PCSK9, inhibits expression of said PCSK9 gene.

15. A vector for inhibiting the expression of the PCSK9 gene in a cell, said vector comprising a regulatory sequence operably linked to a nucleotide sequence that encodes at least one strand of a dsRNA, wherein one of the strands of said dsRNA is substantially complementary to at least a part of a mRNA encoding PCSK9 and wherein said dsRNA is less than 30 base pairs in length and wherein said dsRNA, upon contact with a cell expressing said PCSK9, inhibits the expression of said PCSK9 gene.

16. A cell comprising the vector of claim 15.

17. A double-stranded ribonucleic acid (dsRNA) for reducing the expression level of a human PCSK9 gene in a cell, wherein said dsRNA comprises at least two sequences that are complementary to each other and wherein a sense strand comprises a first sequence and an antisense strand comprises a second sequence comprising a region of complementarity which, is substantially complementary to at least a part of mRNA encoding PCSK9, and wherein said dsRNA, upon contact with a cell expressing said PCSK9, reduces the expression level of said PCSK9 gene.

18. The dsRNA of claim 17, wherein said contact reduces the expression level of said PCSK9 gene.

19. The dsRNA of claim 1, wherein said contact is performed in vitro at 30 nM or less.

20. A pharmaceutical composition for reducing the expression level of the PCSK9 gene in an organism, comprising the dsRNA of claim 17 and a pharmaceutically acceptable carrier.

21. A method of treating a PCSK9 associated disorder comprising administering to a patient in need of such treatment, a therapeutically effective amount of a dsRNA of claim 17.

22. A method of treating a PCSK9-associated disorder comprising administering to a patient in need of such treatment, a therapeutically effective amount of a dsRNA of claim 17.
